(19) United States
(12) Patent Application Publication
(10) Pub. No.: US 2017/0073674 A1
(43) Pub. Date: Mar. 16, 2017

(54) CRISPR/CAS-RELATED METHODS AND COMPOSITIONS FOR TREATING USHER SYNDROME AND RETINITIS PIGMENTOSA

(71) Applicant: EDITAS MEDICINE, INC., Cambridge, MA (US)

(72) Inventors: Morgan L. MAEDER, Jamaica Plain, MA (US); David A. BUMCROT, Belmont, MA (US)

(21) Appl. No.: 15/123,576

(22) PCT Filed: Mar. 5, 2015
(86) PCT No.: PCT/US15/19064

§ 371 Date: Sep. 2, 2016

Related U.S. Application Data
(60) Provisional application No. 61/948,520, filed on Mar. 5, 2014.

(51) Int. Cl. C12N 15/113; C12N 9/22; C12N 7/00; A61K 38/46; A61K 47/26

(52) U.S. Cl. CPC C12N 15/113; A61K 38/465; A61K 47/26; C12N 7/00; C12N 9/22; C12Y 301/00; C12N 2750/14143

(57) ABSTRACT

CRISPR/Cas-related compositions and methods for treatment of Usher Syndrome and/or Retinitis Pigmentosa are disclosed herein.

### REFERENCE TO RELATED APPLICATIONS

[0001] The present application is a U.S. national phase of International Application No. PCT/US15/19064, filed Mar. 5, 2015, which claims the benefit of U.S. Provisional Application No. 61/948,520, filed Mar. 5, 2014, the contents of which are hereby incorporated by reference in their entirety, including drawings.

### FIELD OF THE INVENTION

[0002] The invention relates to CRISPR/Cas-related methods and components for editing of a target nucleic acid sequence, and applications thereof in connection with Usher syndrome and retinitis pigmentosa.

### BACKGROUND

[0003] Usher Syndrome is a common form of inherited combined hearing and vision loss. It affects 1 in 6,000 individuals (Kimberling et al., Genetics in Medicine 2010; 12(8): 512-516). Usher Syndrome is known to be caused by mutations in at least 9 different genes. Usher syndrome type IIA is caused by mutations in the USH2A gene (also known as the RP39 gene). Usher syndrome type II accounts for approximately 50% of all Usher cases (Eudy et al., Science 1998; 280(5370):1753-1757). Usher syndrome type IIA accounts for approximately 80% of all Usher type II cases (Le Quesne Stabel et al., Journal of Molecular Genetics 2012; 49(1):27-36), or 40% of all Usher cases.

[0004] The USH2A gene is 800,503 base pairs and codes for the usherin protein (1,551 amino acids in length). A common mutation in subjects with Usher syndrome type II or non-syndromic retinitis pigmentosa (RP39) is a single nucleotide deletion, e.g., a guanine deletion, at nucleotide position c.2299 (2299delG) in the USH2A gene, which is responsible for between 15% and 78% of USH2A mutations, depending on the population (Baux et al. European Journal of Human Genetics 2010; 18:788-793. Yan et al., Journal of Human Genetics 2009; 54:732-738. Weston et al., American Journal of Human Genetics 2000; 66(4):1199-1210). The deletion of guanine at position 2299 results in a premature stop codon, which leads to a truncated usherin protein. The truncated usherin protein disrupts vision and hearing, leading to visual and hearing loss.

[0005] Visual loss in Usher syndrome usually begins between the ages of 10 and 20. The vision loss is described as retinitis pigmentosa (RP), a retinal dystrophy that tends to affect peripheral visual fields initially. The visual field defect generally progresses inwards, constricting the subject's visual field and over time leading to blindness. Subjects commonly experience loss of night vision early in the disease, followed by loss of peripheral vision, followed by loss of visual acuity (a measure of the central visual field).

[0006] The visual loss associated with Usher syndrome type II is called ‘syndromic’ retinitis pigmentosa, because it is frequently associated with hearing loss. Alternatively, patients can have mutations in USH2A that are not associated with hearing loss. In this case, the patients are defined as having ‘non-syndromic’ retinitis pigmentosa. Non-syndromic retinitis pigmentosa caused by mutations in the USH2A gene may be called retinitis pigmentosa 39, or RP39.

[0007] Usher syndrome also causes deafness. In Usher syndrome type IIA, the age of onset of deafness is most often at birth and consists of moderate to severe hearing impairment which is generally non-progressive. However, in subjects with Usher type IIA, hearing loss may present after birth into teenage years and may be progressive. Usher syndrome type IIA subjects have normal vestibular function. Usher type I subjects are generally born profoundly deaf with absent vestibular function.

[0008] Treatment for the visual loss associated with Usher syndrome type IIA and/or RP-39 is limited. There is currently no approved treatment that substantially reverses or halts the progression of disease in Usher syndrome type 2 or in RP-39. Vitamin A supplementation may delay onset of disease and slow progression. An electrical implant known as the Argus II retinal implant was recently approved for use, but it only offers minimal improvement in vision in patients with RP. The best visual acuity achieved in trials by the device was 20/1260 (legal blindness is defined as 20/200 vision). In addition, current gene therapy delivery techniques are not able to deliver genes encoding large proteins, e.g., the USH2A gene.

[0009] There is also no curative treatment for hearing loss in Usher syndrome type IIA. Subjects with Usher syndrome commonly use hearing aids and cochlear implants. Both are helpful in providing some degree of auditory function but do not restore hearing. Subjects would benefit greatly from a therapeutic which restored hearing and/or prevented further hearing loss.

[0010] Despite advances that have been made in gene therapy and by using cochlear implants, there remains a need for therapeutics to treat the visual loss and deafness associated with Usher syndrome, including Usher syndrome type IIA, and retinitis pigmentosa.

### SUMMARY OF THE INVENTION

[0011] Methods and compositions discussed herein, allow the correction of genetic disorders of the eye and the inner ear, e.g., disorders that affect retinal cells (e.g., photoreceptor cells), cells of the inner ear (e.g., inner hair cells or outer hair cells), or both.

[0012] Methods and compositions discussed herein, provide for treating or delaying the onset or progression of Usher syndrome and retinitis pigmentosa, e.g., Usher Syndrome type IIA (USH2A, USHIIA) and retinitis pigmentosa 39 (RP39). Symptoms associated with Usher syndrome and retinitis pigmentosa, such as vision loss and hearing loss, can also be treated by the methods and compositions disclosed herein.

[0013] Methods and compositions discussed herein, provide for treating or delaying the onset or progression of a disorder caused by mutations in the USH2A gene, including the mutation 2299delG (which causes a premature termination codon).

[0014] Methods and compositions discussed herein, provide for treating or delaying the onset or progression of usher syndrome and retinitis pigmentosa, e.g., Usher Syndrome type IIA (USH2A, USHIIA) and retinitis pigmentosa 39 (RP39) by gene editing, e.g., using CRISPR-Cas9 mediated methods to correct the guanine deletion at position 2299 in the USH2A gene (e.g., replace the deleted guanine residue at position 2299 in the USH2A gene).

[0015] In one aspect, disclosed herein is a gRNA molecule, e.g., an isolated or non-naturally occuring gRNA molecule, comprising a targeting domain which is complementary with a target domain from the USH2A gene. USH2A is also known as US2, RP39, USH2, and dJ1111A8.1.

[0016] In an embodiment, the targeting domain is configured to provide a cleavage event, e.g., a double strand break or a single strand break, within 10, 25, 50, 75, 100, 125, 150, 175, 200, 225, 250, or 300 nucleotides of a target position in the USH2A gene, e.g., a deletion of guanine at nucleotide positon 2299 (2299delG) in the USH2A gene.

[0017] In an embodiment, the targeting domain is configured to provide a cleavage event, e.g., a double strand break or a single strand break, within 10, 25, 50, 75, 100, 125, 150, 175, 200, 225, 250, or 300 nucleotides of a target position in the USH2A gene, e.g., a deletion of guanine at nucleotide positon 2299 (2299delG). In an embodiment, the targeting domain comprises a sequence that is the same as, or differs by no more than 1, 2, 3, 4, or 5 nucleotides from, a targeting domain sequence from Table 1. In some embodiments, the targeting domain is selected from those in Table 1. For example, in certain embodiments, the targeting domain is

GAGUGCAAAAAAGAAGCCAA;
GUUAGAUGUCACCAAUUGUA;
GGUGUCACACUGAAGUCCUU;
GCCAUGGAGGUUACACUGGC;
GUCACAGGCCUUACAAU;
GUCACACUGAAGUCCUU;
UGCAAAAAAGAAGCCAA;
UGCAGAGAAAACUUUUA;
UGUUCACUGAGCCAUGG;
or
AUGGAGGUUACACUGGC.

[0018] In other embodiments, the targeting domain comprises a sequence that is the same as, or differs by no more than 1, 2, 3, 4, or 5 nucleotides from, a targeting domain sequence from Table 2. In an embodiment, the targeting domain is selected from Table 2.

[0019] In other embodiments, the targeting domain comprises a sequence that is the same as, or differs by no more than 1, 2, 3, 4, or 5 nucleotides from, a targeting domain sequence from Table 3. In an embodiment, the targeting domain is selected from Table 3.

[0020] In other embodiments, the targeting domain comprises a sequence that is the same as, or differs by no more than 1, 2, 3, 4, or 5 nucleotides from, a targeting domain sequence from Tables 4A-4E. In an embodiment, the targeting domain is selected from Tables 4A-4E. In certain embodiments, the targeting domain is

GCAAGCCCAAUGUUGAA;
GCAUUACAGACAGUCCC;
GUCACACUGAAGUCCUU;
GUCACAGGCCUUACAAU;
GUCUGUAAUGCUAAGAC;
GACACAGCUGGAUCCCUCCC;
GAGACAGUGCAAUAAAUGUU;
GCACUACACUGCCCAGAGUG;
GCACUGUCUCCCUUCAACAU;
GCCAUGGAGGUUACACUGGC;
GCCUGUGACUGUGACACAGC;
GGUGUCACACUGAAGUCCUU;
or
GUUAGAUGUCACCAAUUGUA.

[0021] In other embodiments, the targeting domain comprises a sequence that is the same as, or differs by no more than 1, 2, 3, 4, or 5 nucleotides from, a targeting domain sequence from Tables 5A-5F. In an embodiment, the targeting domain is selected from Tables 5A-5F.

[0022] In certain embodiments, the targeting domain is

GCACUACACUGCCCAGAGU;
GCCUGUGACUGUGACACAG;
GGCCUGUGACUGUGACACAG;
GGUGUGAUCAUUGCAAUU;
GACACCUGCAGAGAAAACUUUU;
GCAUUACAGACAGUCCCAGGG;
GCUUAGGUGUGAUCAUUGCAAUU;
GCUUCUUUUUUGCACUACACUGCC;
GGCUUAGGUGUGAUCAUUGCAAUU;
GUAAGGCCUGUGACUGUGACACAG;
or
GUGACACCUGCAGAGAAAACUUUU.

[0023] In other embodiments, the targeting domain comprises a sequence that is the same as, or differs by no more than 1, 2, 3, 4, or 5 nucleotides from, a targeting domain sequence from Tables 6A-6D. In an embodiment, the targeting domain is selected from Tables 6A-6D.

[0024] In certain embodiments, the targeting domain is

GUGUCACACUGAAGUCC;
GGUGUGAUCAUUGCAAU;
or
GGGCUCACAUCCAACAUCAU.

[0025] In an embodiment, the gRNA, e.g., a gRNA comprising a targeting domain which is complementary with a target domain from the USH2A gene, is a modular gRNA. In other embodiments, the gRNA is a chimeric gRNA.

[0026] In an embodiment, when two gRNAs are used to position two breaks, e.g., two single strand breaks, in the target nucleic acid sequence, each guide RNA is independently selected from one or more of Tables 1-3, 4A-4E, 5A-5F, or 6A-6D.

[0027] In an embodiment, the targeting domain which is complementary with a target domain from the USH2A gene target position in the USH2A gene is 16 nucleotides or more in length. In an embodiment, the targeting domain is 16 nucleotides in length. In an embodiment, the targeting domain is 17 nucleotides in length. In other embodiments, the targeting domain is 18 nucleotides in length. In still other embodiments, the targeting domain is 19 nucleotides in length. In still other embodiments, the targeting domain is 20 nucleotides in length. In an embodiment, the targeting domain is 21 nucleotides in length. In an embodiment, the targeting domain is 22 nucleotides in length. In an embodiment, the targeting domain is 23 nucleotides in length. In an embodiment, the targeting domain is 24 nucleotides in length. In an embodiment, the targeting domain is 25 nucleotides in length. In an embodiment, the targeting domain is 26 nucleotides in length.

[0028] In an embodiment, the targeting domain comprises 16 nucleotides.

[0029] In an embodiment, the targeting domain comprises 17 nucleotides.

[0030] In an embodiment, the targeting domain comprises 18 nucleotides.

[0031] In an embodiment, the targeting domain comprises 19 nucleotides.

[0032] In an embodiment, the targeting domain comprises 20 nucleotides.

[0033] In an embodiment, the targeting domain comprises 21 nucleotides.

[0034] In an embodiment, the targeting domain comprises 22 nucleotides.

[0035] In an embodiment, the targeting domain comprises 23 nucleotides.

[0036] In an embodiment, the targeting domain comprises 24 nucleotides.

[0037] In an embodiment, the targeting domain comprises 25 nucleotides.

[0038] In an embodiment, the targeting domain comprises 26 nucleotides.

[0039] A gRNA as described herein may comprise from 5′ to 3′: a targeting domain (comprising a “core domain”, and optionally a “secondary domain”); a first complementarity domain; a linking domain; a second complementarity domain; a proximal domain; and a tail domain. In some embodiments, the proximal domain and tail domain are taken together as a single domain.

[0040] In an embodiment, a gRNA comprises a linking domain of no more than 25 nucleotides in length; a proximal and tail domain, that taken together, are at least 20 nucleotides in length; and a targeting domain equal to or greater than 16, 17, 18, 19, 20, 21, 22, 23, 24, 25 or 26 nucleotides in length.

[0041] In another embodiment, a gRNA comprises a linking domain of no more than 25 nucleotides in length; a proximal and tail domain, that taken together, are at least 30 nucleotides in length; and a targeting domain equal to or greater than 16, 17, 18, 19, 20, 21, 22, 23, 24, 25 or 26 nucleotides in length.

[0042] In another embodiment, a gRNA comprises a linking domain of no more than 25 nucleotides in length; a proximal and tail domain, that taken together, are at least 30 nucleotides in length; and a targeting domain equal to or greater than 16, 17, 18, 19, 20, 21, 22, 23, 24, 25 or 26 nucleotides in length.

[0043] In another embodiment, a gRNA comprises a linking domain of no more than 25 nucleotides in length; a proximal and tail domain, that taken together, are at least 40 nucleotides in length; and a targeting domain equal to or greater than 16, 17, 18, 19, 20, 21, 22, 23, 24, 25 or 26 nucleotides in length.

[0044] A cleavage event, e.g., a double strand or single strand break, is generated by a Cas9 molecule. The Cas9 molecule may be an enzymatically active Cas9 (eaCas9) molecule, e.g., an eaCas9 molecule that forms a double strand break in a target nucleic acid or an eaCas9 molecule forms a single strand break in a target nucleic acid (e.g., a nickase molecule).

[0045] In an embodiment, the eaCas9 molecule catalyzes a double strand break.

[0046] In some embodiments, the eaCas9 molecule comprises HNH-like domain cleavage activity but has no, or no significant, N-terminal RuvC-like domain cleavage activity. In this case, the eaCas9 molecule is an HNH-like domain nickase, e.g., the eaCas9 molecule comprises a mutation at D10, e.g., D10A. In other embodiments, the eaCas9 molecule comprises N-terminal RuvC-like domain cleavage activity but has no, or no significant, HNH-like domain cleavage activity. In an embodiment, the eaCas9 molecule is an N-terminal RuvC-like domain nickase, e.g., the eaCas9 molecule comprises a mutation at H840, e.g., H840A. In an embodiment, the eaCas9 molecule is an N-terminal RuvC-like domain nickase, e.g., the eaCas9 molecule comprises a mutation at H863, e.g., H863A.

[0047] In an embodiment, a single strand break is formed in the strand of the target nucleic acid to which the targeting domain of said gRNA is complementary. In another embodiment, a single strand break is formed in the strand of the target nucleic acid other than the strand to which the targeting domain of said gRNA is complementary.

[0048] In another aspect, disclosed herein is a nucleic acid, e.g., an isolated or non-naturally occurring nucleic acid, e.g., DNA, that comprises (a) a sequence that encodes a gRNA molecule comprising a targeting domain that is complementary with a target domain in USH2A gene as disclosed herein.

[0049] In an embodiment, the nucleic acid encodes a gRNA molecule, e.g., the first gRNA molecule, comprising a targeting domain comprising a sequence that is the same as, or differs by no more than 1, 2, 3, 4, or 5 nucleotides from, a targeting domain sequence from any one of Tables 1-3, 4A-4E, 5A-5F, or 6A-6D. In an embodiment, the nucleic acid encodes a gRNA molecule comprising a targeting domain that is selected from those in Tables 1-3, 4A-4E, 5A-5F, or 6A-6D.

[0050] In an embodiment, a nucleic acid encodes a gRNA comprising from 5′ to 3′: a targeting domain (comprising a “core domain”, and optionally a “secondary domain”); a first complementarity domain; a linking domain; a second complementarity domain; a proximal domain; and a tail domain. In some embodiments, the proximal domain and tail domain are taken together as a single domain.

[0051] In an embodiment, the nucleic acid encodes a gRNA molecule comprising a targeting domain is configured to provide a cleavage event, e.g., a double strand break or a single strand break, within 10, 25, 50, 75, 100, 125, 150, 175, 200, 225, 250, or 300 nucleotides of a target position in the USH2A gene, e.g., a deletion of guanine at nucleotide positon 2299 (2299delG) in the USH2A gene.

[0052] In an embodiment, the nucleic acid encodes a gRNA molecule comprising a targeting targeting domain is configured to provide a cleavage event, e.g., a double strand break or a single strand break, within 10, 25, 50, 75, 100, 125, 150, 175, 200, 225, 250, or 300 nucleotides of a target position in the USH2A gene, e.g., a deletion of guanine at nucleotide positon 2299 (2299delG). In an embodiment, the nucleic acid encodes a gRNA molecule comprising a targeting domain comprising a sequence that is the same as, or differs by no more than 1, 2, 3, 4, or 5 nucleotides from, a targeting domain sequence from Table 1. In an embodiment, the nucleic acid encodes a gRNA molecule comprising a targeting domain is selected from those in Table 1. For example, in certain embodiments, the targeting domain is

GAGUGCAAAAAAGAAGCCAA;
GUUAGAUGUCACCAAUUGUA;
GGUGUCACACUGAAGUCCUU;
GCCAUGGAGGUUACACUGGC;
GUCACAGGCCUUACAAU;
GUCACACUGAAGUCCUU;
UGCAAAAAAGAAGCCAA;
UGCAGAGAAAACUUUUA;
UGUUCACUGAGCCAUGG;
or
AUGGAGGUUACACUGGC.

[0053] In another embodiment, the nucleic acid encodes a gRNA molecule comprising a targeting domain comprising a sequence that is the same as, or differs by no more than 1, 2, 3, 4, or 5 nucleotides from, a targeting domain sequence from Table 2. In an embodiment, the targeting domain is selected from Table 2.

[0054] In another embodiment, the nucleic acid encodes a gRNA molecule comprising a targeting domain comprising a sequence that is the same as, or differs by no more than 1, 2, 3, 4, or 5 nucleotides from, a targeting domain sequence from Table 3. In an embodiment, the targeting domain is selected from Table 3.

[0055] In an embodiment, the targeting domain comprises a sequence that is the same as, or differs by no more than 1, 2, 3, 4, or 5 nucleotides from, a targeting domain sequence from Tables 4A-4E. In an embodiment, the targeting domain is selected from Tables 4A-4E. In certain embodiments, the targeting domain is

GCAAGCCCAAUGUUGAA;
GCAUUACAGACAGUCCC;
GUCACACUGAAGUCCUU;
GUCACAGGCCUUACAAU;
GUCUGUAAUGCUAAGAC;
GACACAGCUGGAUCCCUCCC;
GAGACAGUGCAAUAAAUGUU;
GCACUACACUGCCCAGAGUG;
GCACUGUCUCCCUUCAACAU;
GCCAUGGAGGUUACACUGGC;
GCCUGUGACUGUGACACAGC;
GGUGUCACACUGAAGUCCUU;
or
GUUAGAUGUCACCAAUUGUA.

[0056] In another embodiment, the targeting domain comprises a sequence that is the same as, or differs by no more than 1, 2, 3, 4, or 5 nucleotides from, a targeting domain sequence from Tables 5A-5F. In an embodiment, the targeting domain is selected from Tables 5A-5F.

[0057] In certain embodiments, the targeting domain is

GCACUACACUGCCCAGAGU;
GCCUGUGACUGUGACACAG;
GGCCUGUGACUGUGACACAG;
GGUGUGAUCAUUGCAAUU;
GACACCUGCAGAGAAAACUUUU;
GCAUUACAGACAGUCCCAGGG;
GCUUAGGUGUGAUCAUUGCAAUU;
GCUUCUUUUUUGCACUACACUGCC;
GGCUUAGGUGUGAUCAUUGCAAUU;
GUAAGGCCUGUGACUGUGACACAG;
or
GUGACACCUGCAGAGAAAACUUUU.

[0058] In yet another embodiment, the targeting domain comprises a sequence that is the same as, or differs by no more than 1, 2, 3, 4, or 5 nucleotides from, a targeting domain sequence from Tables 6A-6D. In an embodiment, the targeting domain is selected from Tables 6A-6D. In certain embodiments, the targeting domain is

GUGUCACACUGAAGUCC;
GGUGUGAUCAUUGCAAU;
or
GGGCUCACAUCCAACAUCAU.

[0059] In an embodiment, the nucleic acid encodes a modular gRNA, e.g., one or more nucleic acids encode a modular gRNA. In other embodiments, the nucleic acid encodes a chimeric gRNA. The nucleic acid may encode a gRNA, e.g., the first gRNA molecule, comprising a targeting domain comprising 16 nucleotides or more in length. In one embodiment, the nucleic acid encodes a gRNA, e.g., the first gRNA molecule, comprising a targeting domain that is 16 nucleotides in length. In other embodiments, the nucleic acid encodes a gRNA, e.g., the first gRNA molecule, comprising a targeting domain that is 17 nucleotides in length. In still other embodiments, the nucleic acid encodes a gRNA, e.g., the first gRNA molecule, comprising a targeting domain that is 18 nucleotides in length. In still other embodiments, the nucleic acid encodes a gRNA, e.g., the first gRNA molecule, comprising a targeting domain that is 19 nucleotides in length. In still other embodiments, the nucleic acid encodes a gRNA, e.g., the first gRNA molecule, comprising a targeting domain that is 20 nucleotides in length. In still other embodiments, the nucleic acid encodes a gRNA, e.g., the first gRNA molecule, comprising a targeting domain that is 21 nucleotides in length. In still other embodiments, the nucleic acid encodes a gRNA, e.g., the first gRNA molecule, comprising a targeting domain that is 22 nucleotides in length. In still other embodiments, the nucleic acid encodes a gRNA, e.g., the first gRNA molecule, comprising a targeting domain that is 23 nucleotides in length. In still other embodiments, the nucleic acid encodes a gRNA, e.g., the first gRNA molecule, comprising a targeting domain that is 24 nucleotides in length. In still other embodiments, the nucleic acid encodes a gRNA, e.g., the first gRNA molecule, comprising a targeting domain that is 25 nucleotides in length. In still other embodiments, the nucleic acid encodes a gRNA, e.g., the first gRNA molecule, comprising a targeting domain that is 26 nucleotides in length.

[0060] In an embodiment, a nucleic acid encodes a gRNA comprising from 5′ to 3′: a targeting domain (comprising a “core domain”, and optionally a “secondary domain”); a first complementarity domain; a linking domain; a second complementarity domain; a proximal domain; and a tail domain. In some embodiments, the proximal domain and tail domain are taken together as a single domain.

[0061] In an embodiment, a nucleic acid encodes a gRNA comprising a linking domain of no more than 25 nucleotides in length; a proximal and tail domain, that taken together, are at least 20 nucleotides in length; and a targeting domain equal to or greater than 16, 17, 18, 19, 20, 21, 22, 23, 24, 25 or 26 nucleotides in length.

[0062] In an embodiment, a nucleic acid encodes a gRNA comprising a linking domain of no more than 25 nucleotides in length; a proximal and tail domain, that taken together, are at least 30 nucleotides in length; and a targeting domain equal to or greater than 16, 17, 18, 19, 20, 21, 22, 23, 24, 25 or 26 nucleotides in length.

[0063] In an embodiment, a nucleic acid encodes a gRNA comprising a linking domain of no more than 25 nucleotides in length; a proximal and tail domain, that taken together, are at least 30 nucleotides in length; and a targeting domain equal to or greater than 16, 17, 18, 19, 20, 21, 22, 23, 24, 25 or 26 nucleotides in length.

[0064] In an embodiment, a nucleic acid encodes a gRNA comprising a linking domain of no more than 25 nucleotides in length; a proximal and tail domain, that taken together, are at least 40 nucleotides in length; and a targeting domain equal to or greater than 16, 17, 18, 19, 20, 21, 22, 23, 24, 25 or 26 nucleotides in length.

[0065] In an embodiment, a nucleic acid comprises (a) a sequence that encodes a gRNA molecule comprising a targeting domain that is complementary with a target domain in the USH2A gene as disclosed herein, and further comprising (b) a sequence that encodes a Cas9 molecule.

[0066] The Cas9 molecule may be a nickase molecule, a enzymatically activating Cas9 (eaCas9) molecule, e.g., an eaCas9 molecule that forms a double strand break in a target nucleic acid and an eaCas9 molecule forms a single strand break in a target nucleic acid. In an embodiment, a single strand break is formed in the strand of the target nucleic acid to which the targeting domain of said gRNA is complementary. In another embodiment, a single strand break is formed in the strand of the target nucleic acid other than the strand to which to which the targeting domain of said gRNA is complementary.

[0067] In an embodiment, the eaCas9 molecule catalyzes a double strand break.

[0068] In some embodiments, the eaCas9 molecule comprises HNH-like domain cleavage activity but has no, or no significant, N-terminal RuvC-like domain cleavage activity. In other embodiments, the said eaCas9 molecule is an HNH-like domain nickase, e.g., the eaCas9 molecule comprises a mutation at D10, e.g., D10A. In other embodiments, the eaCas9 molecule comprises N-terminal RuvC-like domain cleavage activity but has no, or no significant, HNH-like domain cleavage activity. In another embodiment, the eaCas9 molecule is an N-terminal RuvC-like domain nickase, e.g., the eaCas9 molecule comprises a mutation at H840, e.g., H840A. In another embodiment, the eaCas9 molecule is an N-terminal RuvC-like domain nickase, e.g., the eaCas9 molecule comprises a mutation at H863, e.g., H863A.

[0069] A nucleic acid disclosed herein may comprise (a) a sequence that encodes a gRNA molecule comprising a targeting domain that is complementary with a target domain in the USH2A gene as disclosed herein; and (b) a sequence that encodes a Cas9 molecule.

[0070] A nucleic acid disclosed herein may comprise (a) a sequence that encodes a gRNA molecule comprising a targeting domain that is complementary with a target domain in the USH2A gene as disclosed herein; (b) a sequence that encodes a Cas9 molecule; and further may comprises (c)(i) a sequence that encodes a second gRNA molecule described herein having a targeting domain that is complementary to a second target domain of the USH2A gene, and optionally, (c)(ii) a sequence that encodes a third gRNA molecule described herein having a targeting domain that is complementary to a third target domain of the USH2A gene; and optionally, (c)(iii) a sequence that encodes a fourth gRNA molecule described herein having a targeting domain that is complementary to a fourth target domain of the USH2A gene. In an embodiment, a nucleic acid encoding a second gRNA molecule comprising a targeting domain is configured to provide a cleavage event, e.g., a double strand break or a single strand break, within 10, 25, 50, 75, 100, 125, 150, 175, 200, 225, 250, or 300 nucleotides of a target position in the USH2A gene, e.g., a deletion of guanine at nucleotide positon 2299 (2299delG) in the USH2A gene.

[0071] In an embodiment, a nucleic acid encodes a second gRNA molecule comprising a targeting domain configured to provide a cleavage event, e.g., a double strand break or a single strand break, sufficiently close to the target position in the USH2A gene to allow alteration, either alone or in combination with the break positioned by the first gRNA molecule.

[0072] In an embodiment, a nucleic acid encodes a third gRNA molecule comprising a targeting domain configured to provide a cleavage event, e.g., a double strand break or a single strand break, sufficiently close to the target position in the USH2A gene to allow alteration, either alone or in combination with the break positioned by the first and/or second gRNA molecule.

[0073] In an embodiment, a nucleic acid encodes a fourth gRNA molecule comprising a targeting domain configured to provide a cleavage event, e.g., a double strand break or a single strand break, sufficiently close to the target position in the USH2A gene to allow alteration, either alone or in combination with the break positioned by the first gRNA molecule, the second gRNA molecule and/or the third gRNA molecule.

[0074] In an embodiment, a nucleic acid encodes a second gRNA molecule comprising a targeting domain configured to provide a cleavage event, e.g., a double strand break or a single strand break, in combination with the break position by said first gRNA molecule, sufficiently close to the target position in the USH2A gene to allow alteration of the target position, either alone or in combination with the break positioned by said first gRNA molecule.

[0075] In an embodiment, a nucleic acid encodes a third gRNA molecule comprising a targeting domain configured to provide a cleavage event, e.g., a double strand break or a single strand break, in combination with the break position by said first and/or second gRNA molecule, sufficiently close to the target position in the USH2A gene to allow alteration, either alone or in combination with the break positioned by the first and/or second gRNA molecule.

[0076] In an embodiment, a nucleic acid encodes a fourth gRNA molecule comprising a targeting domain configured to provide a cleavage event, e.g., a double strand break or a single strand break, in combination with the break positioned by the first gRNA molecule, the second gRNA molecule and/or the third gRNA molecule, sufficiently close to the target position in the USH2A gene to allow alteration, either alone or in combination with the break positioned by the first gRNA molecule, the second gRNA molecule and/or the third gRNA molecule.

[0077] In an embodiment, a nucleic acid encoding a second gRNA molecule comprising a targeting targeting domain is configured to provide a cleavage event, e.g., a double strand break or a single strand break, within 10, 25, 50, 75, 100, 125, 150, 175, 200, 225, 250, or 300 nucleotides of a target position in the USH2A gene, e.g., a deletion of guanine at nucleotide positon 2299 (2299delG). In an embodiment, the nucleic acid encodes a second gRNA molecule comprising a targeting domain comprising a sequence that is the same as, or differs by no more than 1, 2, 3, 4, or 5 amino acids from, a targeting domain sequence from Tables 1-3, 4A-4E, 5A-5F, or 6A-6D. In an embodiment, the nucleic acid encodes a second gRNA molecule comprising a targeting domain is selected from those in Tables 1-3, 4A-4E, 5A-5F, or 6A-6D. For example, in certain embodiments, the targeting domain is

GAGUGCAAAAAAGAAGCCAA;
GUUAGAUGUCACCAAUUGUA;
GGUGUCACACUGAAGUCCUU;
GCCAUGGAGGUUACACUGGC;
GUCACAGGCCUUACAAU;
GUCACACUGAAGUCCUU;
UGCAAAAAAGAAGCCAA;
UGCAGAGAAAACUUUUA;
UGUUCACUGAGCCAUGG;
or
AUGGAGGUUACACUGGC.

[0078] In certain embodiments, the targeting domain is

GCAAGCCCAAUGUUGAA;
GCAUUACAGACAGUCCC;
GUCACACUGAAGUCCUU;
GUCACAGGCCUUACAAU;
GUCUGUAAUGCUAAGAC;
GACACAGCUGGAUCCCUCCC;
GAGACAGUGCAAUAAAUGUU;
GCACUACACUGCCCAGAGUG;
GCACUGUCUCCCUUCAACAU;
GCCAUGGAGGUUACACUGGC;
GCCUGUGACUGUGACACAGC;
GGUGUCACACUGAAGUCCUU;
or
GUUAGAUGUCACCAAUUGUA.

[0079] In certain embodiments, the targeting domain is

GCACUACACUGCCCAGAGU;
GCCUGUGACUGUGACACAG;
GGCCUGUGACUGUGACACAG;
GGUGUGAUCAUUGCAAUU;
GACACCUGCAGAGAAAACUUUU;
GCAUUACAGACAGUCCCAGGG;
GCUUAGGUGUGAUCAUUGCAAUU;
GCUUCUUUUUUGCACUACACUGCC;
GGCUUAGGUGUGAUCAUUGCAAUU;
GUAAGGCCUGUGACUGUGACACAG;
or
GUGACACCUGCAGAGAAAACUUUU.

[0080] In certain embodiments, the targeting domain is

GUGUCACACUGAAGUCC;
GGUGUGAUCAUUGCAAU;
or
GGGCUCACAUCCAACAUCAU.

[0081] In an embodiment, a nucleic acid encoding a third gRNA molecule comprising a targeting targeting domain is configured to provide a cleavage event, e.g., a double strand break or a single strand break, within 10, 25, 50, 75, 100, 125, 150, 175, 200, 225, 250, or 300 nucleotides of a target position in the USH2A gene, e.g., a deletion of guanine at nucleotide positon 2299 (2299delG). In an embodiment, the nucleic acid encodes a second gRNA molecule comprising a targeting domain comprising a sequence that is the same as, or differs by no more than 1, 2, 3, 4, or 5 amino acids from, a targeting domain sequence from Tables 1-3, 4A-4E, 5A-5F, or 6A-6D. In an embodiment, the nucleic acid encodes a third gRNA molecule comprising a targeting domain is selected from those in Tables 1-3, 4A-4E, 5A-5F, or 6A-6D. For example, in certain embodiments, the targeting domain is

GAGUGCAAAAAAGAAGCCAA;
GUUAGAUGUCACCAAUUGUA;
GGUGUCACACUGAAGUCCUU;
GCCAUGGAGGUUACACUGGC;
GUCACAGGCCUUACAAU;
GUCACACUGAAGUCCUU;
UGCAAAAAAGAAGCCAA;
UGCAGAGAAAACUUUUA;
UGUUCACUGAGCCAUGG;
or
AUGGAGGUUACACUGGC.

[0082] In certain embodiments, the targeting domain is

GCAAGCCCAAUGUUGAA;
GCAUUACAGACAGUCCC;
GUCACACUGAAGUCCUU;
GUCACAGGCCUUACAAU;
GUCUGUAAUGCUAAGAC;
GACACAGCUGGAUCCCUCCC;
GAGACAGUGCAAUAAAUGUU;
GCACUACACUGCCCAGAGUG;
GCACUGUCUCCCUUCAACAU;
GCCAUGGAGGUUACACUGGC;
GCCUGUGACUGUGACACAGC;
GGUGUCACACUGAAGUCCUU;
or
GUUAGAUGUCACCAAUUGUA.

[0083] In certain embodiments, the targeting domain is

GCACUACACUGCCCAGAGU;
GCCUGUGACUGUGACACAG;
GGCCUGUGACUGUGACACAG;
GGUGUGAUCAUUGCAAUU;
GACACCUGCAGAGAAAACUUUU;
GCAUUACAGACAGUCCCAGGG;
GCUUAGGUGUGAUCAUUGCAAUU;
GCUUCUUUUUUGCACUACACUGCC;
GGCUUAGGUGUGAUCAUUGCAAUU;
GUAAGGCCUGUGACUGUGACACAG;
or
GUGACACCUGCAGAGAAAACUUUU.

[0084] In certain embodiments, the targeting domain is

GUGUCACACUGAAGUCC;
GGUGUGAUCAUUGCAAU;
or
GGGCUCACAUCCAACAUCAU.

[0085] In an embodiment, a nucleic acid encoding a fourth gRNA molecule comprising a targeting targeting domain is configured to provide a cleavage event, e.g., a double strand break or a single strand break, within 10, 25, 50, 75, 100, 125, 150, 175, 200, 225, 250, or 300 nucleotides of a target position in the USH2A gene, e.g., a deletion of guanine at nucleotide positon 2299 (2299delG). In an embodiment, the nucleic acid encodes a fourth gRNA molecule comprising a targeting domain comprising a sequence that is the same as, or differs by no more than 1, 2, 3, 4, or 5 amino acids from, a targeting domain sequence from Tables 1-3, 4A-4E, 5A-5F, or 6A-6D. In an embodiment, the nucleic acid encodes a second gRNA molecule comprising a targeting domain is selected from those in Tables 1-3, 4A-4E, 5A-5F, or 6A-6D. For example, in certain embodiments, the targeting domain is

GAGUGCAAAAAAGAAGCCAA;
GUUAGAUGUCACCAAUUGUA;
GGUGUCACACUGAAGUCCUU;
GCCAUGGAGGUUACACUGGC;
GUCACAGGCCUUACAAU;
GUCACACUGAAGUCCUU;
UGCAAAAAAGAAGCCAA;
UGCAGAGAAAACUUUUA;
UGUUCACUGAGCCAUGG;
or
AUGGAGGUUACACUGGC.

[0086] In certain embodiments, the targeting domain is

GCAAGCCCAAUGUUGAA;
GCAUUACAGACAGUCCC;
GUCACACUGAAGUCCUU;
GUCACAGGCCUUACAAU;
GUCUGUAAUGCUAAGAC;
GACACAGCUGGAUCCCUCCC;
GAGACAGUGCAAUAAAUGUU;
GCACUACACUGCCCAGAGUG;
GCACUGUCUCCCUUCAACAU;
GCCAUGGAGGUUACACUGGC;
GCCUGUGACUGUGACACAGC;
GGUGUCACACUGAAGUCCUU;
or
GUUAGAUGUCACCAAUUGUA.

[0087] In certain embodiments, the targeting domain is

GCACUACACUGCCCAGAGU;
GCCUGUGACUGUGACACAG;
GGCCUGUGACUGUGACACAG;
GGUGUGAUCAUUGCAAUU;
GACACCUGCAGAGAAAACUUUU;
GCAUUACAGACAGUCCCAGGG;
GCUUAGGUGUGAUCAUUGCAAUU;
GCUUCUUUUUUGCACUACACUGCC;
GGCUUAGGUGUGAUCAUUGCAAUU;
GUAAGGCCUGUGACUGUGACACAG;
or
GUGACACCUGCAGAGAAAACUUUU.

[0088] In certain embodiments, the targeting domain is

GUGUCACACUGAAGUCC;
GGUGUGAUCAUUGCAAU;
or
GGGCUCACAUCCAACAUCAU.

[0089] In another embodiment, the nucleic acid encodes a second gRNA molecule comprising a targeting domain comprising a sequence that is the same as, or differs by no more than 1, 2, 3, 4, or 5 nucleotides from, a targeting domain sequence from Table 1. In an embodiment, the targeting domain is selected from Table 1. In another embodiment, the nucleic acid encodes a third gRNA molecule comprising a targeting domain comprising a sequence that is the same as, or differs by no more than 1, 2, 3, 4, or 5 nucleotides from, a targeting domain sequence from Table 1. In an embodiment, the targeting domain is selected from Table 1. In another embodiment, the nucleic acid encodes a fourth gRNA molecule comprising a targeting domain comprising a sequence that is the same as, or differs by no more than 1, 2, 3, 4, or 5 nucleotides from, a targeting domain sequence from Table 1. In an embodiment, the targeting domain is selected from Table 1.

[0090] In another embodiment, the nucleic acid encodes a second gRNA molecule comprising a targeting domain comprising a sequence that is the same as, or differs by no more than 1, 2, 3, 4, or 5 nucleotides from, a targeting domain sequence from Table 2. In an embodiment, the targeting domain is selected from Table 2. In another embodiment, the nucleic acid encodes a third gRNA molecule comprising a targeting domain comprising a sequence that is the same as, or differs by no more than 1, 2, 3, 4, or 5 nucleotides from, a targeting domain sequence from Table 2. In an embodiment, the targeting domain is selected from Table 2. In another embodiment, the nucleic acid encodes a fourth gRNA molecule comprising a targeting domain comprising a sequence that is the same as, or differs by no more than 1, 2, 3, 4, or 5 nucleotides from, a targeting domain sequence from Table 2. In an embodiment, the targeting domain is selected from Table 2.

[0091] In another embodiment, the nucleic acid encodes a second gRNA molecule comprising a targeting domain comprising a sequence that is the same as, or differs by no more than 1, 2, 3, 4, or 5 nucleotides from, a targeting domain sequence from Table 3. In an embodiment, the targeting domain is selected from Table 3. In another embodiment, the nucleic acid encodes a third gRNA molecule comprising a targeting domain comprising a sequence that is the same as, or differs by no more than 1, 2, 3, 4, or 5 nucleotides from, a targeting domain sequence from Table 3. In an embodiment, the targeting domain is selected from Table 3. In another embodiment, the nucleic acid encodes a fourth gRNA molecule comprising a targeting domain comprising a sequence that is the same as, or differs by no more than 1, 2, 3, 4, or 5 nucleotides from, a targeting domain sequence from Table 3. In an embodiment, the targeting domain is selected from Table 3.

[0092] In an embodiment, the nucleic acid encodes a second gRNA molecule comprising a targeting domain comprising a sequence that is the same as, or differs by no more than 1, 2, 3, 4, or 5 nucleotides from, a targeting domain sequence from Tables 4A-4E. In an embodiment, the targeting domain is selected from Tables 4A-4E. In another embodiment, the nucleic acid encodes a third gRNA molecule comprising a targeting domain comprising a sequence that is the same as, or differs by no more than 1, 2, 3, 4, or 5 nucleotides from, a targeting domain sequence from Tables 4A-4E. In an embodiment, the targeting domain is selected from Tables 4A-4E. In yet another embodiment, the nucleic acid encodes a fourth gRNA molecule comprising a targeting domain comprising a sequence that is the same as, or differs by no more than 1, 2, 3, 4, or 5 nucleotides from, a targeting domain sequence from Tables 4A-4E. In an embodiment, the targeting domain is selected from Tables 4A-4E.

[0093] In an embodiment, the nucleic acid encodes a second gRNA molecule comprising a targeting domain comprising a sequence that is the same as, or differs by no more than 1, 2, 3, 4, or 5 nucleotides from, a targeting domain sequence from Tables 5A-5F. In an embodiment, the targeting domain is selected from Tables 5A-5F. In another embodiment, the nucleic acid encodes a third gRNA molecule comprising a targeting domain comprising a sequence that is the same as, or differs by no more than 1, 2, 3, 4, or 5 nucleotides from, a targeting domain sequence from Tables 5A-5F. In an embodiment, the targeting domain is selected from Tables 5A-5F. In yet another embodiment, the nucleic acid encodes a third gRNA molecule comprising a targeting domain comprising a sequence that is the same as, or differs by no more than 1, 2, 3, 4, or 5 nucleotides from, a targeting domain sequence from Tables 5A-5F. In an embodiment, the targeting domain is selected from Tables 5A-5F.

[0094] In an embodiment, the nucleic acid encodes a second gRNA molecule comprising a targeting domain comprising a sequence that is the same as, or differs by no more than 1, 2, 3, 4, or 5 nucleotides from, a targeting domain sequence from Tables 6A-6D. In an embodiment, the targeting domain is selected from Tables 6A-6D. In another embodiment, the nucleic acid encodes a second gRNA molecule comprising a targeting domain comprising a sequence that is the same as, or differs by no more than 1, 2, 3, 4, or 5 nucleotides from, a targeting domain sequence from Tables 6A-6D. In an embodiment, the targeting domain is selected from Tables 6A-6D. In yet another embodiment, the nucleic acid encodes a second gRNA molecule comprising a targeting domain comprising a sequence that is the same as, or differs by no more than 1, 2, 3, 4, or 5 nucleotides from, a targeting domain sequence from Tables 6A-6D. In an embodiment, the targeting domain is selected from Tables 6A-6D.

[0095] In an embodiment, the nucleic acid encodes a second gRNA which is a modular gRNA, e.g., wherein one or more nucleic acid molecules encode a modular gRNA. In another embodiment, the nucleic acid encoding a second gRNA is a chimeric gRNA. In yet another embodiment, when a nucleic acid encodes a third or fourth gRNA, the third and fourth gRNA may be a modular gRNA or a chimeric gRNA. When multiple gRNAs are used, any combination of modular or chimeric gRNAs may be used.

[0096] A nucleic acid may encode a second, a third, and/or a fourth gRNA, each independently, comprising a targeting domain comprising 16 nucleotides or more in length. In an embodiment, the nucleic acid encodes a second gRNA comprising a targeting domain that is 16 nucleotides in length. In an embodiment, the nucleic acid encodes a second gRNA comprising a targeting domain that is 17 nucleotides in length. In other embodiments, the nucleic acid encodes a second gRNA comprising a targeting domain that is 18 nucleotides in length. In still other embodiments, the nucleic acid encodes a second gRNA comprising a targeting domain that is 19 nucleotides in length. In still other embodiments, the nucleic acid encodes a second gRNA comprising a targeting domain that is 20 nucleotides in length. In still other embodiments, the nucleic acid encodes a second gRNA comprising a targeting domain that is 21 nucleotides in length. In still other embodiments, the nucleic acid encodes a second gRNA comprising a targeting domain that is 22 nucleotides in length. In still other embodiments, the nucleic acid encodes a second gRNA comprising a targeting domain that is 23 nucleotides in length. In still other embodiments, the nucleic acid encodes a second gRNA comprising a targeting domain that is 24 nucleotides in length. In still other embodiments, the nucleic acid encodes a second gRNA comprising a targeting domain that is 25 nucleotides in length. In still other embodiments, the nucleic acid encodes a second gRNA comprising a targeting domain that is 26 nucleotides in length.

[0097] In an embodiment, the targeting domain comprises 16 nucleotides.

[0098] In an embodiment, the targeting domain comprises 17 nucleotides.

[0099] In an embodiment, the targeting domain comprises 18 nucleotides.

[0100] In an embodiment, the targeting domain comprises 19 nucleotides.

[0101] In an embodiment, the targeting domain comprises 20 nucleotides.

[0102] In an embodiment, the targeting domain comprises 21 nucleotides.

[0103] In an embodiment, the targeting domain comprises 22 nucleotides.

[0104] In an embodiment, the targeting domain comprises 23 nucleotides.

[0105] In an embodiment, the targeting domain comprises 24 nucleotides.

[0106] In an embodiment, the targeting domain comprises 25 nucleotides.

[0107] In an embodiment, the targeting domain comprises 26 nucleotides.

[0108] In an embodiment, a nucleic acid encodes a second, a third, and/or a fourth gRNA, each independently, comprising from 5′ to 3′: a targeting domain (comprising a “core domain”, and optionally a “secondary domain”); a first complementarity domain; a linking domain; a second complementarity domain; a proximal domain; and a tail domain. In some embodiments, the proximal domain and tail domain are taken together as a single domain.

[0109] In an embodiment, a nucleic acid encodes a second gRNA comprising a linking domain of no more than 25 nucleotides in length; a proximal and tail domain, that taken together, are at least 20 nucleotides in length; and a targeting domain equal to or greater than 16, 17, 18, 19, 20, 21, 22, 23, 24, 25 or 26 nucleotides in length.

[0110] In an embodiment, a nucleic acid encodes a second gRNA comprising a linking domain of no more than 25 nucleotides in length; a proximal and tail domain, that taken together, are at least 30 nucleotides in length; and a targeting domain equal to or greater than 16, 17, 18, 19, 20, 21, 22, 23, 24, 25 or 26 nucleotides in length.

[0111] In an embodiment, a nucleic acid encodes a second gRNA comprising a linking domain of no more than 25 nucleotides in length; a proximal and tail domain, that taken together, are at least 30 nucleotides in length; and a targeting domain equal to or greater than 16, 17, 18, 19, 20, 21, 22, 23, 24, 25 or 26 nucleotides in length.

[0112] In an embodiment, a nucleic acid encodes a second gRNA comprising a linking domain of no more than 25 nucleotides in length; a proximal and tail domain, that taken together, are at least 40 nucleotides in length; and a targeting domain equal to or greater than 16, 17, 18, 19, 20, 21, 22, 23, 24, 25 or 26 nucleotides in length.

[0113] In some embodiments, the nucleic acid encodes (a) a sequence that encodes a gRNA molecule comprising a targeting domain that is complementary with a target domain in the USH2A gene as disclosed herein; (b) a sequence that encodes a Cas9 molecule; and further comprises (c)(i) a sequence that encodes a second gRNA molecule described herein having a targeting domain that is complementary to a second target domain of the USH2A gene, and optionally, (c)(ii) a sequence that encodes a third gRNA molecule described herein having a targeting domain that is complementary to a third target domain of the USH2A gene; and optionally, (c)(iii) a sequence that encodes a fourth gRNA molecule described herein having a targeting domain that is complementary to a fourth target domain of the USH2A gene. In some embodiments, the targeting domain of the gRNA molecule and the targeting domain of the second gRNA molecules are complementary to opposite strands of the targent nucleic acid molecule. In some embodiments, the gRNA molecule and the second gRNA molecule are configured such that the PAMs are oriented outward.

[0114] In some embodiments, the gRNA molecule and said second gRNA molecule are configured such that they do not overlap and are separated by as much as 50, 100, or 200 nucleotides. The gRNA and second gRNA may be configured such that single strand breaks are formed on each strand of the target nucleic acid. In an embodiment, the gRNA and the second gRNA are configured such that single strand breaks are formed on each strand of the target nucleic acid and the single strand beaks are within 50-100 nucleotides of one another.

[0115] In an embodiment, the gRNA molecule and the second gRNA molecule are configured such that the first and second breaks are 5′ to a target position in the USH2A gene, e.g., a deletion of guanine at nucleotide positon 2299 (2299delG). In another embodiment, the gRNA molecule and the second gRNA molecule are configured such that the first and second breaks are 3′ to a target position in the USH2A gene, e.g., a deletion of guanine at nucleotide positon 2299 (2299delG). In another embodiment, the gRNA molecule and said second gRNA molecule are configured such that the first and second breaks flank a target position in the USH2A gene, e.g., a deletion of guanine at nucleotide positon 2299 (2299delG).

[0116] In some embodiments, the nucleic acid encodes (a) a sequence that encodes a gRNA molecule comprising a targeting domain that is complementary with a target domain in the USH2A gene as disclosed herein; (b) a sequence that encodes a Cas9 molecule; (c) a sequence that encodes a second, third and/or fourth gRNA molecule described herein having a targeting domain that is complementary to a second target domain of the USH2A gene; and further comprising (d) a template nucleic acid. In an embodiment, the template nucleic acid is a single stranded nucleic acid. In another embodiment, the template nucleic acid is a double stranded nucleic acid. In some embodiments, the template nucleic acid comprises a nucleotide sequence, e.g., of one or more nucleotides, that will be added to or will template a change in the target nucleic acid. In other embodiments, the template nucleic acid comprises a nucleotide sequence that may be used to modify the target position. In other embodiments, the template nucleic acid comprises a nucleotide sequence, e.g., of one or more nucleotides, that corresponds to wildtype sequence of the target nucleic acid, e.g., of the target position.

[0117] The template nucleic acid may comprise a replacement sequence, e.g., a replacement sequence from the Table 13. In some embodiments, the template nucleic acid comprises a 5′ homology arm, e.g., a 5′ homology arm from Table 13. In other embodiments, the template nucleic acid comprises a 3′ homology arm, e.g., a 3′ homology arm from Table 13.

[0118] As described above, a nucleic acid may comprise (a) a sequence encoding a gRNA molecule comprising a targeting domain that is complementary with a target domain in USH2A gene, and (b) a sequence encoding a Cas9 molecule. In some embodiments, (a) and (b) are present on the same nucleic acid molecule, e.g., the same vector, e.g., the same viral vector, e.g., the same adeno-associated virus (AAV) vector. In an embodiment, the nucleic acid molecule is an AAV vector.

[0119] In other embodiments, (a) is present on a first nucleic acid molecule, e.g. a first vector, e.g., a first viral vector, e.g., a first AAV vector; and (b) is present on a second nucleic acid molecule, e.g., a second vector, e.g., a second vector, e.g., a second AAV vector. The first and second nucleic acid molecules may be AAV vectors.

[0120] In other embodiments, the nucleic acid may further comprise (c) a sequence that encodes a second, third and/or fourth gRNA molecule as described herein. In some embodiments, the nucleic acid comprises (a), (b) and (c), but not (d), a template nucleic acid. Each of (a) and (c) may be present on the same nucleic acid molecule, e.g., the same vector, e.g., the same viral vector, e.g., the same adeno-associated virus (AAV) vector. In an embodiment, the nucleic acid molecule is an AAV vector.

[0121] In other embodiment, (a) and (c) are on different vectors. For example, (a) may be present on a first nucleic acid molecule, e.g. a first vector, e.g., a first viral vector, e.g., a first AAV vector; and (c) may be present on a second nucleic acid molecule, e.g., a second vector, e.g., a second vector, e.g., a second AAV vector. In an embodiment, the first and second nucleic acid molecules are AAV vectors.

[0122] In another embodiment, each of (a), (b), and (c) are present on the same nucleic acid molecule, e.g., the same vector, e.g., the same viral vector, e.g., an AAV vector. In an embodiment, the nucleic acid molecule is an AAV vector. In an alternate embodiment, one of (a), (b), and (c) is encoded on a first nucleic acid molecule, e.g., a first vector, e.g., a first viral vector, e.g., a first AAV vector; and a second and third of (a), (b), and (c) is encoded on a second nucleic acid molecule, e.g., a second vector, e.g., a second vector, e.g., a second AAV vector. The first and second nucleic acid molecule may be AAV vectors.

[0123] In an embodiment, (a) is present on a first nucleic acid molecule, e.g., a first vector, e.g., a first viral vector, a first AAV vector; and (b) and (c) are present on a second nucleic acid molecule, e.g., a second vector, e.g., a second vector, e.g., a second AAV vector. The first and second nucleic acid molecule may be AAV vectors.

[0124] In other embodiments, (b) is present on a first nucleic acid molecule, e.g., a first vector, e.g., a first viral vector, e.g., a first AAV vector; and (a) and (c) are present on a second nucleic acid molecule, e.g., a second vector, e.g., a second vector, e.g., a second AAV vector. The first and second nucleic acid molecule may be AAV vectors.

[0125] In other embodiments, (c) is present on a first nucleic acid molecule, e.g., a first vector, e.g., a first viral vector, e.g., a first AAV vector; and (a) and (b) are present on a second nucleic acid molecule, e.g., a second vector, e.g., a second vector, e.g., a second AAV vector. The first and second nucleic acid molecule may be AAV vectors.

[0126] In another embodiment, each of (a), (b), (c) and (d) are present on the same nucleic acid molecule, e.g., the same vector, e.g., the same viral vector, e.g., an AAV vector. In an embodiment, the nucleic acid molecule may be an AAV vector.

[0127] In other embodiments, one of (a), (b), (c) and (d) is encoded on a first nucleic acid molecule, e.g., a first vector, e.g., a first viral vector, e.g., a first AAV vector; and a second, third, and fourth of (a), (b), (c) and (d) is encoded on a second nucleic acid molecule, e.g., a second vector, e.g., a second vector, e.g., a second AAV vector. The first and second nucleic acid molecule may be AAV vectors.

[0128] In other embodiments, (a) is present on a first nucleic acid molecule, e.g., a first vector, e.g., a first viral vector, e.g., a first AAV vector; and (b), (c), and (d) are present on a second nucleic acid molecule, e.g., a second vector, e.g., a second vector, e.g., a second AAV vector. The first and second nucleic acid molecule may be AAV vectors.

[0129] In other embodiments, (b) is present on a first nucleic acid molecule, e.g., a first vector, e.g., a first viral vector, e.g., a first AAV vector; and (a), (c), and (d) are present on a second nucleic acid molecule, e.g., a second vector, e.g., a second vector, e.g., a second AAV vector. The first and second nucleic acid molecule may be AAV vectors.

[0130] In other embodiments, (c) is present on a first nucleic acid molecule, e.g., a first vector, e.g., a first viral vector, e.g., a first AAV vector; and (a), (b), and (d) are present on a second nucleic acid molecule, e.g., a second vector, e.g., a second vector, e.g., a second vector, e.g., a second AAV vector. The first and second nucleic acid molecule may be AAV vectors.

[0131] In other embodiments, (d) is present on a first nucleic acid molecule, e.g., a first vector, e.g., a first viral vector, e.g., a first AAV vector; and (a), (b), and (c) are present on a second nucleic acid molecule, e.g., a second vector, e.g., a second vector, e.g., a second vector, e.g., a second AAV vector. The first and second nucleic acid molecule may be AAV vectors.

[0132] In other embodiments, a first and second of (a), (b), (c) and (d) is encoded on a first nucleic acid molecule, e.g., a first vector, e.g., a first viral vector, e.g., a first viral vector, e.g., a first AAV vector; and a third and fourth of (a), (b), (c) and (d) is encoded on a second nucleic acid molecule, e.g., a second vector, e.g., a second vector, e.g., a second vector, e.g., a second AAV vector. The first and second nucleic acid molecule may be AAV vectors.

[0133] In other embodiments, (a) and (b) are present on a first nucleic acid molecule, e.g., a first vector, e.g., a first viral vector, e.g., a first AAV vector; and (c) and (d) are present on a second nucleic acid molecule, e.g., a second vector, e.g., a second vector, e.g., a second vector, e.g., a second AAV vector. The first and second nucleic acid molecule may be AAV vectors.

[0134] In other embodiments, (a) and (c) are present on a first nucleic acid molecule, e.g., a first vector, e.g., a first viral vector, e.g., a first AAV vector; and (b) and (d) are present on a second nucleic acid molecule, e.g., a second vector, e.g., a second vector, e.g., a second vector, e.g., a second AAV vector. The first and second nucleic acid molecule may be AAV vectors.

[0135] In other embodiments, (a) and (d) are present on a first nucleic acid molecule, e.g., a first vector, e.g., a first viral vector, e.g., a first AAV vector; and (b) and (c) are present on a second nucleic acid molecule, e.g., a second vector, e.g., a second vector, e.g., a second vector, e.g., a second AAV vector. The first and second nucleic acid molecule may be AAV vectors.

[0136] In other embodiments, (b) and (d) are present on a first nucleic acid molecule, e.g., a first vector, e.g., a first viral vector, e.g., a first AAV vector; and (a) and (c) are present on a second nucleic acid molecule, e.g., a second vector, e.g., a second vector, e.g., a second vector, e.g., a second AAV vector. The first and second nucleic acid molecule may be AAV vectors.

[0137] In other embodiments, the first nucleic acid molecule is other than an AAV vector and the second nucleic acid molecule is an AAV vector. In still other embodiments, the first nucleic acid molecule is an AAV vector and the second nucleic acid molecule is other than an AAV vector.

[0138] The nucleic acids described herein may comprise a promoter operably linked to the sequence that encodes said gRNA molecule of (a), e.g., a promoter described herein. The nucleic acid may further comprise a second promoter operably linked to the sequence that encodes the second gRNA molecule of (c), e.g., a promoter described herein. The promoter and second promoter differ from one another. In some embodiments, the promoter and second promoter are the same.

[0139] The nucleic acids described herein may further comprise a promoter operably linked to the sequence that encodes the Cas9 molecule of (b), e.g., a promoter described herein.

[0140] In another aspect, disclosed herein is a composition comprising (a) a gRNA molecule comprising a targeting domain that is complementary with a target domain in USH2A gene, as described herein. The composition of (a) may further comprise (b) a Cas9 molecule, e.g., a Cas9 molecule as described herein. A composition of (a) and (b) may further comprise (c) a second gRNA molecule, e.g., a second, third and/or fourth gRNA molecule, e.g., a second, third and/or fourth gRNA molecule, as described herein. A composition of (a), (b) and (c) may futher comprise (d) a template nucleic acid, e.g., a template nucleic acid described herein, e.g., a template nucleic acid, as described herein. In an embodiment, the composition is a pharmaceutical composition. The Compositions described herein, e.g., pharmaceutical compositions described herein, can be used in treating Usher Syndrome or retinitis pigmentosa 39 in a subject, e.g., in accordance with a method disclosed herein.

[0141] In another aspect, disclosed herein is a method of altering a cell, e.g., altering the structure, e.g., altering the sequence, of a target nucleic acid of a cell, comprising contacting said cell with: (a) a gRNA that targets the USH2A gene, e.g., a gRNA as described herein; (b) a Cas9 molecule, e.g., a Cas9 molecule as described herein; and optionally, (c) a second, third and/or fourth gRNA that targets USH2A gene, e.g., a second, third and/or fourth gRNA as described herein; and (d) a template nucleic acid, e.g., a template nucleic acid as described herein.

[0142] In some embodiments, the method comprises contacting said cell with (a), (b), (c), and (d). The gRNA of (a) may be selected from any of Tables 1-3, 4A-4E, 5A-5F, or 6A-6D, or a gRNA that differs by no more than 1, 2, 3, 4, or 5 nucleotides from, a targeting domain sequence from any of Tables 1-3, 4A-4E, 5A-5F, or 6A-6D. The gRNA of (c) may be selected from any of Tables 1-3, 4A-4E, 5A-5F, or 6A-6D, or a gRNA that differs by no more than 1, 2, 3, 4, or 5 nucleotides from, a targeting domain sequence from any of Tables 1-3, 4A-4E, 5A-5F, or 6A-6D.

[0143] In some embodiments, the method comprises contacting a cell from a subject. The cell may be from a subject having a mutation in the USH2A gene, e.g., a deletion of guanine at nucleotide positon 2299 (2299delG) in the USH2A gene. In an embodiment, the cell is from a subject suffering from Usher syndrome, e.g., Usher syndrome type 2A. In another embodiment, the cell is from a subject suffering from retinitis pigmentosa, e.g., retinitis pigmentosa 39.

[0144] In some embodiments, the cell being contacted in the disclosed method is a photoreceptor cell. The contacting may be performed ex vivo and the contacted cell may be returned to the subject's body after the contacting step. In other embodiments, the contacting step may be performed in vivo.

[0145] In some embodiments, the cell being contacted in the disclosed method is an inner hair cell or an outer hair cell. The contacting may be performed ex vivo and the contacted cell may be returned to the subject's body after the contacting step. In other embodiments, the contacting step may be performed in vivo.

[0146] In some embodiments, the method of altering a cell as described herein comprises acquiring knowledge of a mutation in the USH2A gene, e.g., a deletion of guanine at nucleotide positon 2299 (2299delG) in said cell, prior to the contacting step. Acquiring knowledge of the presence of a mutation in the USH2A gene, e.g., a deletion of guanine at nucleotide positon 2299 (2299delG) in the cell may be by sequencing a portion of the USH2A (or RP39) gene. In some embodiments, acquiring knowledge of a mutation in the USH2A (or RP39) gene is used to treat a subject (or a cell from the subject) likely to develop Usher syndrome or retinitis pigmentosa (e.g., correct the guanine deletion at nucleotide position 2299).

[0147] Based on the presence of a mutation in the USH2A gene, e.g., a deletion of guanine at nucleotide positon 2299 (2299delG), the method may further comprise selecting a template nucleic, e.g., to correct the mutation in the cell. For example, the method may comprise correcting a guanine deletion at nucleotide position 2299 in the USH2A gene.

[0148] In some embodiments, the contacting step of the method comprises contacting the cell with a nucleic acid, e.g., a vector, e.g., an AAV vector, that expresses at least one of (a), (b), and (c). In some embodiments, the contacting step of the method comprises contacting the cell with a nucleic acid, e.g., a vector, e.g., an AAV vector, that expresses each of (a), (b), and (c). In another embodiment, the contacting step of the method comprises delivering to the cell the Cas9 molecule of (b) and a nucleic acid which encodes a gRNA of (a) and optionally, a second, third and/or fourth gRNA of (c).

[0149] In an embodiment, the contacting step comprises contacting the cell with a nucleic acid, e.g., a vector, e.g., an AAV vector, described herein.

[0150] In an embodiment, the contacting step comprises delivering to the cell the Cas9 molecule of (b), as a protein or an mRNA, and a nucleic acid which encodes a gRNA of (a) and optionally a second, third and/or fourth gRNA of (c).

[0151] In an embodiment, the contacting step comprises delivering to the cell the Cas9 molecule of (b), as a protein or an mRNA, said gRNA of (a), as an RNA, and optionally said second, third and/or fourth gRNA of (c), as an RNA.

[0152] In an embodiment, the contacting step comprises delivering to the cell the gRNA of (a) as an RNA, optionally the second, third and/or fourth gRNA of (c) as an RNA, and a nucleic acid that encodes the Cas9 molecule of (b).

[0153] In another aspect, disclosed herein is a method of treating a subject having or likely to develop Usher Syndrome, e.g., by altering the structure, e.g., the sequence, of a target nucleic acid of the subject, comprising contacting said subject (or a cell from said subject) with:

[0154] (a) a gRNA that targets the USH2A gene, e.g., a gRNA disclosed herein;

[0155] (b) a Cas9 molecule, e.g., a Cas9 molecule disclosed herein;

[0156] optionally, (c)(i) a second gRNA that targets USH2A gene, e.g., a second gRNA disclosed herein; and further optionally, (c)(ii) a third gRNA, and still further optionally, (c)(iii) a fourth gRNA that target the CEP290, e.g., a fourth gRNA disclosed herein, and

[0157] (d) a template nucleic acid, e.g., a template nucleic acid disclosed herein.

[0158] In an embodiment, contacting comprises contacting with (a), (b), and (d).

[0159] In an embodiment, contacting comprises contacting with (a), (b), (c)(i), and (d).

[0160] In an embodiment, contacting comprises contacting with (a), (b), (c)(i), (c)(ii), and (d).

[0161] In an embodiment, contacting comprises contacting with (a), (b), (c)(i), (c)(ii), (c)(iii), and (d).

[0162] The gRNA of (a) or (c) (e.g., (c)(i), (c)(ii), or (c)(iii)) may be independently selected from any of Tables 1-3, 4A-4E, 5A-5F, or 6A-6D, or a gRNA that differs by no more than 1, 2, 3, 4, or 5 nucleotides from, a targeting domain sequence from any of Tables 1-3, 4A-4E, 5A-5F, or 6A-6D.

[0163] In an embodiment, said subject is suffering from Usher syndrome. In an embodiment, said subject has a mutation in the USH2A gene, e.g., a deletion of guanine at nucleotide positon 2299 (2299delG) in the USH2A gene.

[0164] In an embodiment, the method comprises acquiring knowledge of the presence of a mutation in the USH2A gene, e.g., a deletion of guanine at nucleotide positon 2299 (2299delG) in the USH2A gene, in said subject.

[0165] In an embodiment, the method comprises acquiring knowledge of the presence of a mutation in the USH2A gene, e.g., a deletion of guanine at nucleotide positon 2299 (2299delG) in the USH2A gene, in said subject by sequencing a portion of the USH2A gene.

[0166] In an embodiment, a cell of said subject is contacted ex vivo with (a), (b), (d), and optionally (c)(i), further optionally (c)(ii), and still further optionally (c)(iii). In an embodiment, said cell is returned to the subject's body.

[0167] In an embodiment, the method comprises a treatment comprising introducing a cell into said subject's body, wherein said cell subject was contacted ex vivo with (a), (b), (d), and optionally (c)(i), further optionally (c)(ii), and still further optionally (c)(iii).

[0168] In an embodiment, the method comprises said contacting, e.g., contacting a cell of the subject, is performed in vivo. In an embodiment, contacting the cell of a subject in vivo is by subretinal delivery. In an embodiment, contacting the cell of a subject in vivo is by subretinal injection.

[0169] In an embodiment, the contacting step comprises contacting said subject with a nucleic acid, e.g., a vector, e.g., an AAV vector, described herein, e.g., a nucleic acid that expresses at least one of (a), (b), (c)(i), (c)(ii), or (c)(iii).

[0170] In an embodiment, the contacting step comprises delivering to said subject said Cas9 molecule of (b), as a protein or mRNA, and a nucleic acid which encodes (a), and optionally (c)(i), further optionally (c)(ii), and still further optionally (c)(iii).

[0171] In an embodiment, the contacting step comprises delivering to said subject said Cas9 molecule of (b), as a protein or mRNA, said gRNA of (a), as an RNA, and optionally said second gRNA of (c)(i), further optionally said third gRNA of (c)(ii), and still further optionally said fourth gRNA of (c)(iii), as an RNA.

[0172] In an embodiment, the contacting step comprises delivering to said subject said gRNA of (a), as an RNA, optionally said second gRNA of (c)(i), further optionally said third gRNA of (c)(ii), and still further optionally said fourth gRNA of (c)(iii), as an RNA, and a nucleic acid that encodes the Cas9 molecule of (b).

[0173] In another aspect, disclosed herein is a method of treating a subject having or likely to develop retinitis pigmentosa, e.g., by altering the structure, e.g., the sequence, of a target nucleic acid of the subject, comprising contacting said subject (or a cell from said subject) with:

[0174] (a) a gRNA that targets the RP39 (also known as USH2A) gene, e.g., a gRNA disclosed herein;

[0175] (b) a Cas9 molecule, e.g., a Cas9 molecule disclosed herein;

[0176] optionally, (c)(i) a second gRNA that targets USH2A gene, e.g., a second gRNA disclosed herein; and further optionally, (c)(ii) a third gRNA, and still further optionally, (c)(iii) a fourth gRNA that target the CEP290, e.g., a third and fourth gRNA disclosed herein, and

[0177] (d) a template nucleic acid, e.g., a template nucleic acid disclosed herein.

[0178] In an embodiment, contacting comprises contacting with (a), (b), and (d).

[0179] In an embodiment, contacting comprises contacting with (a), (b), (c)(i), and (d).

[0180] In an embodiment, contacting comprises contacting with (a), (b), (c)(i), (c)(ii), and (d).

[0181] In an embodiment, contacting comprises contacting with (a), (b), (c)(i), (c)(ii), (c)(iii), and (d).

[0182] The gRNA of (a) may be selected from any of Tables 1-3, 4A-4E, 5A-5F, or 6A-6D, or a gRNA that differs by no more than 1, 2, 3, 4, or 5 nucleotides from, a targeting domain sequence from any of Tables 1-3, 4A-4E, 5A-5F, or 6A-6D.

[0183] The gRNA of (c) may be selected from any of Tables 1-3, 4A-4E, 5A-5F, or 6A-6D, or a gRNA that differs by no more than 1, 2, 3, 4, or 5 nucleotides from, a targeting domain sequence from any of Tables 1-3, 4A-4E, 5A-5F, or 6A-6D.

[0184] In an embodiment, said subject is suffering from Usher syndrome or retinitis pigmentosa. In an embodiment, said subject has a mutation in the USH2A gene, e.g., a deletion of guanine at nucleotide positon 2299 (2299delG) in the USH2A gene.

[0185] In an embodiment, the method comprises acquiring knowledge of the presence of a mutation in the USH2A gene, e.g., a deletion of guanine at nucleotide positon 2299 (2299delG) in the USH2A gene, in said subject.

[0186] In an embodiment, the method comprises acquiring knowledge of the presence of a mutation in the USH2A gene, e.g., a deletion of guanine at nucleotide positon 2299 (2299delG) in the USH2A gene, in said subject by sequencing a portion of the USH2A gene.

[0187] In an embodiment, said subject is suffering from retinitis pigmentosa, e.g., retinitis pigmentosa 39. In an embodiment, said subject has a mutation in the RP39 (also known as USH2A) gene, e.g., a deletion of guanine at nucleotide positon 2299 (2299delG) in the RP39 gene.

[0188] In an embodiment, the method comprises acquiring knowledge of the presence of a mutation in the RP39 gene, e.g., a deletion of guanine at nucleotide positon 2299 (2299delG) in the RP39 gene, in said subject.

[0189] In an embodiment, the method comprises acquiring knowledge of the presence of a mutation in the RP39 gene, e.g., a deletion of guanine at nucleotide positon 2299 (2299delG) in the RP39 gene, in said subject by sequencing a portion of the USH2A gene.

[0190] In an embodiment, the method comprises, based on the presence of a mutation in the USH2A (or RP39) gene, e.g., a deletion of guanine at nucleotide positon 2299 (2299delG), selecting a template nucleic acid.

[0191] In an embodiment, the method comprises correcting a deletion of a guanine at nucleotide positon 2299 (2299delG) in the USH2A (or RP39) gene.

[0192] In an embodiment, a cell of said subject is contacted ex vivo with (a), (b), (d), and optionally (c)(i), further optionally (c)(ii), and still further optionally (c)(iii). In an embodiment, said cell is returned to the subject's body.

[0193] In an embodiment, the method comprises a treatment comprising introducing a cell into said subject's body, wherein said cell subject was contacted ex vivo with (a), (b), (d), and optionally (c)(i), further optionally (c)(ii), and still further optionally (c)(iii).

[0194] In an embodiment, the method comprises said contacting, e.g., contacting a cell of the subject, is performed in vivo. In an embodiment, contacting the cell of a subject in vivo is by subretinal delivery. In an embodiment, contacting the cell of a subject in vivo is by subretinal injection.

[0195] In an embodiment, the contacting step comprises contacting said subject with a nucleic acid, e.g., a vector, e.g., an AAV vector, described herein, e.g., a nucleic acid that expresses at least one of (a), (b), (c)(i), c(ii), or c(iii).

[0196] In an embodiment, the contacting step comprises delivering to said subject said Cas9 molecule of (b), as a protein or mRNA, and a nucleic acid which encodes (a), and optionally (c)(i), further optionally (c)(ii), and still further optionally (c)(iii).

[0197] In an embodiment, the contacting step comprises delivering to said subject said Cas9 molecule of (b), as a protein or mRNA, said gRNA of (a), as an RNA, and optionally said second gRNA of (c)(i), further optionally said third gRNA of (c)(ii), and still further optionally said third gRNA of (c)(iii), as an RNA.

[0198] In an embodiment, the contacting step comprises delivering to said subject said gRNA of (a), as an RNA, optionally said second gRNA of (c)(i), further optionally said third gRNA of (c)(ii), and still further optionally said third gRNA of (c)(iii), as an RNA, and a nucleic acid that encodes the Cas9 molecule of (b).

[0199] In another aspect, disclosed herein is a reaction mixture comprising a gRNA, a nucleic acid, or a composition described herein, and a cell, e.g., a cell from a subject having Usher syndrome or retinitis pigmentosa 39, or a subject having a mutation in the USH2A (or RP39) gene, e.g., a deletion of guanine at nucleotide positon 2299 (2299delG).

[0200] In another aspect, disclosed herein is a kit comprising (a) gRNA molecule described herein, or nucleic acid that encodes said gRNA, and one or more of the following:

[0201] (b) a Cas9 molecule, e.g., a Cas9 molecule described herein;

[0202] (c)(i) a second gRNA molecule, e.g., a second gRNA molecule described herein;

[0203] (c)(ii) a third gRNA molecule, e.g., a second gRNA molecule described herein; or

[0204] (c)(iii) a fourth gRNA molecule, e.g., a second gRNA molecule described herein;

[0205] (d) a template nucleic acid e.g., a template nucleic acid described herein;

[0206] (e) nucleic acid that encodes one or more of (b), (c)(i), (c)(ii), (c)(iii), or (d).

[0207] In an embodiment, the kit comprises a nucleic acid, e.g., an AAV vector, that encodes one or more of (a), (b), (c)(i), (c)(ii), or c(iii).

[0208] In an embodiment, the kit further comprises a template nucleic acid, e.g., a single strand DNA that comprises said template nucleic acid.

[0209] In another aspect, disclosed herein is non-naturally occurring template nucleic acid described herein.

[0210] In yet another aspect, disclosed herein is a gRNA molecule, e.g., a gRNA molecule described herein, for use in treating Usher Syndrome or retinitis pigmentosa 39 in a subject, e.g., in accordance with a method of treating Usher Syndrome or retinitis pigmentosa 39 as described herein.

[0211] In an embodiment, the gRNA molecule in used in combination with a Cas9 molecule, e.g., a Cas9 molecule described herein. Additionaly or alternatively, in an embodiment, the gRNA molecule is used in combination with a second, third and/or fourth gRNA molecule, e.g., a second, third and/or fourth gRNA molecule described herein. Additionaly or alternatively, in an embodiment, the gRNA molecule is used in combination with a template nucleic acid, e.g., a template nucleic acid described herein.

[0212] In still another aspect, disclosed herein is use of a gRNA molecule, e.g., a gRNA molecule described herein, in the manufacture of a medicament for treating Usher Syndrome or retinitis pigmentosa 39 in a subject, e.g., in accordance with a method of treating Usher Syndrome or retinitis pigmentosa 39 as described herein.

[0213] In an embodiment, the medicament comprises a Cas9 molecule, e.g., a Cas9 molecule described herein. Additionaly or alternatively, in an embodiment, the medicament comprises a second, third and/or fourth gRNA molecule, e.g., a second, third and/or fourth gRNA molecule described herein. Additionaly or alternatively, in an embodiment, the medicament comprises a template nucleic acid, e.g., a template nucleic acid described herein.

[0214] The gRNA molecules and methods, as disclosed herein, can be used in combination with a governing gRNA molecule. As used herein, a governing gRNA molecule refers to a gRNA molecule comprising a targeting domain which is complementary to a target domain on a nucleic acid that encodes a component of the CRISPR/Cas system introduced into a cell or subject. For example, the methods described herein can further include contacting a cell or subject with a governing gRNA molecule or a nucleic acid encoding a governing molecule. In an embodiment, the governing gRNA molecule targets a nucleic acid that encodes a Cas9 molecule or a nucleic acid that encodes a target gene gRNA molecule. In an embodiment, the governing gRNA comprises a targeting domain that is complementary to a target domain in a sequence that encodes a Cas9 component, e.g., a Cas9 molecule or target gene gRNA molecule. In an embodiment, the target domain is designed with, or has, minimal homology to other nucleic acid sequences in the cell, e.g., to minimize off-target cleavage. For example, the targeting domain on the governing gRNA can be selected to reduce or minimize off-target effects. In an embodiment, a target domain for a governing gRNA can be disposed in the control or coding region of a Cas9 molecule or disposed between a control region and a transcribed region. In an embodiment, a target domain for a governing gRNA can be disposed in the control or coding region of a target gene gRNA molecule or disposed between a control region and a transcribed region for a target gene gRNA. While not wishing to be bound by theory, in an embodiment, it is believed that altering, e.g., inactivating, a nucleic acid that encodes a Cas9 molecule or a nucleic acid that encodes a target gene gRNA molecule can be effected by cleavage of the targeted nucleic acid sequence or by binding of a Cas9 molecule/governing gRNA molecule complex to the targeted nucleic acid sequence.

[0215] The compositions, reaction mixtures and kits, as disclosed herein, can also include a governing gRNA molecule, e.g., a governing gRNA molecule disclosed herein,

[0216] Unless otherwise defined, all technical and scientific terms used herein have the same meaning as commonly understood by one of ordinary skill in the art to which this invention belongs. Although methods and materials similar or equivalent to those described herein can be used in the practice or testing of the present invention, suitable methods and materials are described below. All publications, patent applications, patents, and other references mentioned herein are incorporated by reference in their entirety. In addition, the materials, methods, and examples are illustrative only and not intended to be limiting.

[0217] Headings, including numeric and alphabetical headings and subheadings, are for organization and presentation and are not intended to be limiting.

[0218] Other features and advantages of the invention will be apparent from the detailed description, drawings, and from the claims.

### BRIEF DESCRIPTION OF THE DRAWINGS

[0219] FIGS. 1A-1G are representations of several exemplary gRNAs.

[0220] FIG. 1A depicts a modular gRNA molecule derived in part (or modeled on a sequence in part) from Streptococcus pyogenes (S. pyogenes) as a duplexed structure (SEQ ID NOS: 42 and 43, respectively, in order of appearance);

[0221] FIG. 1B depicts a unimolecular (or chimeric) gRNA molecule derived in part from S. pyogenes as a duplexed structure (SEQ ID NO: 44);

[0222] FIG. 1C depicts a unimolecular gRNA molecule derived in part from S. pyogenes as a duplexed structure (SEQ ID NO: 45);

[0223] FIG. 1D depicts a unimolecular gRNA molecule derived in part from S. pyogenes as a duplexed structure (SEQ ID NO: 46);

[0224] FIG. 1E depicts a unimolecular gRNA molecule derived in part from S. pyogenes as a duplexed structure (SEQ ID NO: 47);

[0225] FIG. 1F depicts a modular gRNA molecule derived in part from Streptococcus thermophilus (S. thermophilus) as a duplexed structure (SEQ ID NOS: 48 and 49, respectively, in order of appearance);

[0226] FIG. 1G depicts an alignment of modular gRNA molecules of S. pyogenes and S. thermophilus (SEQ ID NOS: 50-53, respectively, in order of appearance).

[0227] FIGS. 2A-2G depict an alignment of Cas9 sequences from Chylinski et al. (RNA Biol. 2013; 10(5): 726-737). The N-terminal RuvC-like domain is boxed and indicated with a “Y”. The other two RuvC-like domains are boxed and indicated with a “B”. The HNH-like domain is boxed and indicated by a “G”. Sm: S. mutans (SEQ ID NO: 1); Sp: S. pyogenes (SEQ ID NO: 2); St: S. thermophilus (SEQ ID NO: 3); Li: L. innocua (SEQ ID NO: 4). Motif: this is a motif based on the four sequences: residues conserved in all four sequences are indicated by single letter amino acid abbreviation; “*” indicates any amino acid found in the corresponding position of any of the four sequences; and “-” indicates any amino acid, e.g., any of the 20 naturally occurring amino acids, or absent.

[0228] FIGS. 3A-3B show an alignment of the N-terminal RuvC-like domain from the Cas9 molecules disclosed in Chylinski et at (SEQ ID NOS: 54-103, respectively, in order of appearance). The last line of FIG. 3B identifies 4 highly conserved residues.

[0229] FIGS. 4A-4B show an alignment of the N-terminal RuvC-like domain from the Cas9 molecules disclosed in Chylinski et al. with sequence outliers removed (SEQ ID NOS: 104-177, respectively, in order of appearance). The last line of FIG. 4B identifies 3 highly conserved residues.

[0230] FIGS. 5A-5C show an alignment of the HNH-like domain from the Cas9 molecules disclosed in Chylinski et at (SEQ ID NOS: 178-252, respectively, in order of appearance). The last line of FIG. 5C identifies conserved residues.

[0231] FIGS. 6A-6B show an alignment of the HNH-like domain from the Cas9 molecules disclosed in Chylinski et al. with sequence outliers removed (SEQ ID NOS: 253-302, respectively, in order of appearance). The last line of FIG. 6B identifies 3 highly conserved residues.

[0232] FIGS. 7A-7B depict an alignment of Cas9 sequences from S. pyogenes and Neisseria meningitidis (N. meningitidis). The N-terminal RuvC-like domain is boxed and indicated with a “Y”. The other two RuvC-like domains are boxed and indicated with a “B”. The HNH-like domain is boxed and indicated with a “G”. Sp: S. pyogenes; Nm: N. meningitidis. Motif: this is a motif based on the two sequences: residues conserved in both sequences are indicated by a single amino acid designation; “*” indicates any amino acid found in the corresponding position of any of the two sequences; “-” indicates any amino acid, e.g., any of the 20 naturally occurring amino acids, and “-” indicates any amino acid, e.g., any of the 20 naturally occurring amino acids, or absent.

[0233] FIG. 8 shows a nucleic acid sequence encoding Cas9 of N. meningitidis (SEQ ID NO: 303). Sequence indicated by an “R” is an SV40 NLS; sequence indicated as “G” is an HA tag; and sequence indicated by an “O” is a synthetic NLS sequence; the remaining (unmarked) sequence is the open reading frame (ORF).

[0234] FIGS. 9A and 9B are schematic representations of the domain organization of S. pyogenes Cas 9. FIG. 9A shows the organization of the Cas9 domains, including amino acid positions, in reference to the two lobes of Cas9 (recognition (REC) and nuclease (NUC) lobes). FIG. 9B shows the percent homology of each domain across 83 Cas9 orthologs.

### DETAILED DESCRIPTION

### Definitions

[0235] Domain, as used herein, is used to describe segments of a protein or nucleic acid. Unless otherwise indicated, a domain is not required to have any specific functional property.

[0236] Calculations of homology or sequence identity between two sequences (the terms are used interchangeably herein) are performed as follows. The sequences are aligned for optimal comparison purposes (e.g., gaps can be introduced in one or both of a first and a second amino acid or nucleic acid sequence for optimal alignment and non-homologous sequences can be disregarded for comparison purposes). The optimal alignment is determined as the best score using the GAP program in the GCG software package with a Blossum 62 scoring matrix with a gap penalty of 12, a gap extend penalty of 4, and a frameshift gap penalty of 5. The amino acid residues or nucleotides at corresponding amino acid positions or nucleotide positions are then compared. When a position in the first sequence is occupied by the same amino acid residue or nucleotide as the corresponding position in the second sequence, then the molecules are identical at that position. The percent identity between the two sequences is a function of the number of identical positions shared by the sequences.

[0237] “Governing gRNA molecule”, as used herein, refers to a gRNA molecule that comprises a targeting domain that is complementary to a target domain on a nucleic acid that comprises a sequence that encodes a component of the CRISPR/Cas system that is introduced into a cell or subject. A governing gRNA does not target an endogenous cell or subject sequence. In an embodiment, a governing gRNA molecule comprises a targeting domain that is complementary with a target sequence on: (a) a nucleic acid that encodes a Cas9 molecule; (b) a nucleic acid that encodes a gRNA which comprises a targeting domain that targets the USH2A gene (a target gene gRNA); or on more than one nucleic acid that encodes a CRISPR/Cas component, e.g., both (a) and (b). In an embodiment, a nucleic acid molecule that encodes a CRISPR/Cas component, e.g., that encodes a Cas9 molecule or a target gene gRNA, comprises more than one target domain that is complementary with a governing gRNA targeting domain. While not wishing to be bound by theory, in an embodiment, it is believed that a governing gRNA molecule complexes with a Cas9 molecule and results in Cas9 mediated inactivation of the targeted nucleic acid, e.g., by cleavage or by binding to the nucleic acid, and results in cessation or reduction of the production of a CRISPR/Cas system component. In an embodiment, the Cas9 molecule forms two complexes: a complex comprising a Cas9 molecule with a target gene gRNA, which complex will alter the USH2A gene; and a complex comprising a Cas9 molecule with a governing gRNA molecule, which complex will act to prevent further production of a CRISPR/Cas system component, e.g., a Cas9 molecule or a target gene gRNA molecule. In an embodiment, a governing gRNA molecule/Cas9 molecule complex binds to or promotes cleavage of a control region sequence, e.g., a promoter, operably linked to a sequence that encodes a Cas9 molecule, a sequence that encodes a transcribed region, an exon, or an intron, for the Cas9 molecule. In an embodiment, a governing gRNA molecule/Cas9 molecule complex binds to or promotes cleavage of a control region sequence, e.g., a promoter, operably linked to a gRNA molecule, or a sequence that encodes the gRNA molecule. In an embodiment, the governing gRNA, e.g., a Cas9-targeting governing gRNA molecule, or a target gene gRNA-targeting governing gRNA molecule, limits the effect of the Cas9 molecule/target gene gRNA molecule complex-mediated gene targeting. In an embodiment, a governing gRNA places temporal, level of expression, or other limits, on activity of the Cas9 molecule/target gene gRNA molecule complex. In an embodiment, a governing gRNA reduces off-target or other unwanted activity. In an embodiment, a governing gRNA molecule inhibits, e.g., entirely or substantially entirely inhibits, the production of a component of the Cas9 system and thereby limits, or governs, its activity.

[0238] “Modulator”, as used herein, refers to an entity, e.g., a drug, that can alter the activity (e.g., enzymatic activity, transcriptional activity, or translational activity), amount, distribution, or structure of a subject molecule or genetic sequence. In an embodiment, modulation comprises cleavage, e.g., breaking of a covalent or non-covalent bond, or the forming of a covalent or non-covalent bond, e.g., the attachment of a moiety, to the subject molecule. In an embodiment, a modulator alters the, three dimensional, secondary, tertiary, or quaternary structure, of a subject molecule. A modulator can increase, decrease, initiate, or eliminate a subject activity.

[0239] “Large molecule”, as used herein, refers to a molecule having a molecular weight of at least 2, 3, 5, 10, 20, 30, 40, 50, 60, 70, 80, 90, or 100 kD. Large molecules include proteins, polypeptides, nucleic acids, biologics and carbohydrates.

[0240] “Polypeptide”, as used herein, refers to a polymer of amino acids having less than 100 amino acid residues. In an embodiment it has less than 50, 20, or 10 amino acid residues.

[0241] “Reference molecule”, e.g., a reference Cas9 molecule or reference gRNA, as used herein, refers to a molecule to which a subject molecule, e.g., a subject Cas9 molecule of subject gRNA molecule, e.g., a modified or candidate Cas9 molecule is compared. For example, a Cas9 molecule may be characterized as having no more than 10% of the nuclease activity of a reference Cas9 molecule. Examples of reference Cas9 molecules include naturally occurring unmodified Cas9 molecules, e.g., a naturally occurring Cas9 molecule such as a Cas9 molecule of S. pyogenes S. aureus or S. thermophilus. In an embodiment, the reference Cas9 molecule is the naturally occurring Cas9 molecule having the closest sequence identity or homology with the Cas9 molecule to which it is being compared. In an embodiment, the reference Cas9 molecule is a sequence, e.g., a naturally occurring or known sequence, which is the parental form on which a change, e.g., a mutation has been made.

[0242] “Replacement”, or “replaced”, as used herein with reference to a modification of a molecule does not require a process limitation but merely indicates that the replacement entity is present.

[0243] “Small molecule”, as used herein, refers to a compound having a molecular weight less than about 2 kD, e.g., less than about 2 kD, less than about 1.5 kD, less than about 1 kD, or less than about 0.75 kD.

[0244] “Subject”, as used herein, may mean either a human or non-human animal. The term includes, but is not limited to, mammals (e.g., humans, other primates, pigs, rodents (e.g., mice and rats or hamsters), rabbits, guinea pigs, cows, horses, cats, dogs, sheep, and goats). In an embodiment the subject is a human. In other embodiments the subject is poultry.

[0245] “Treat”, “treating” and “treatment”, as used herein, mean the treatment of a disease in a mammal, e.g., in a human, including (a) inhibiting the disease, i.e., arresting or preventing its development; (b) relieving the disease, i.e., causing regression of the disease state; and (c) curing the disease.

[0246] “X”, as used herein, in the context of an amino acid sequence, refers to any amino acid (e.g., any of the twenty natural amino acids) unless otherwise specified.

### Usher Syndrome

[0247] Usher syndrome is a disease characterized by progressive loss of vision beginning between the ages of 10 and 20. Usher syndrome type 1 symptoms are generally more severe and have an earlier onset than those of Usher syndrome type 2 (e.g., Usher syndrome type 2A). The vision loss in Usher syndrome is described as retinitis pigmentosa (RP), a group of inherited retinal dystrophies that affect photoreceptors and retinal pigment epithelium cells.

[0248] Subjects suffering from Usher syndrome type II have mutations in the USH2A gene (also known as the RP39 gene) and develop vision loss that is accompanied by hearing loss (and/or balance problems). The visual loss associated with Usher syndrome type II is called ‘syndromic’ retinitis pigmentosa, because it is associated with hearing loss. Alternatively, patients can have mutations in USH2A that are not associated with hearing loss. In this case, the patients are defined as having ‘non-syndromic’ retinitis pigmentosa. Non-syndromic retinitis pigmentosa caused by mutations in the USH2A gene is also called retinitis pigmentosa 39, or RP39. In both syndromic and non-syndromic RP, repair of the USH2A mutations within the eye may ameliorate or slow the progression of retinitis pigmentosa. In syndromic RP, repair of USH2A mutations may ameliorate vision loss but not address hearing loss. In non-syndromic RP, repair of USH2A may ameliorate vision loss (but not hearing loss as there in no hearing loss in non-syndromic RP).

[0249] The USH2A gene is 85,000 base pairs and codes for the usherin protein. Usherin is expressed in photoreceptors of the retina and in inner hair cells and outer hair cells in the inner ear. The most common mutation in subjects with Usher syndrome type II or non-syndromic retinitis pigmentosa (RP39) is a single nucleotide deletion, e.g., a guanine deletion, at nucleotide position 2299 (2299delG) in the USH2A gene, which is responsible for somewhere between 15% and 40% of USH2A mutations. The deletion of guanine at position 2299 results in a premature stop codon.

[0250] The USH2A gene is expressed in retinal photoreceptor (PR) rods and cones. Photorecptors cells have an outer segment made of a cilium that plays an important role in the retinoid cycle and the phototransduction cascade. The USH2A gene encodes the usherin protein which is responsible for protein trafficking in the PR outer segment. Mutations in the USH2A gene leads to interrupted protein transport between the ciliary inner segment and outer segment. This causes PR dysfunction and loss of vision in retinitis pigmentosa.

[0251] As RP progresses, PR rods generally degenerate first. In most cases of RP, rod photoreceptor cells function poorly and begin to die at the earliest stages of disease, resulting in poor night vision and declining peripheral vision. PR cones generally degenerate late in the course of disease. This causes the typical phenotypic progression experienced by RP patients. They experience loss of peripheral visual fields followed by loss of central visual fields (the latter measured by decreases in visual acuity).

Methods to Treat or Prevent Usher Syndrome Type 2A and/or Retinitis Pigmentosa 39

[0252] Treatment for RP is limited and there is currently no approved treatment that substantially reverses or halts the progression of disease in Usher Syndrome type 2 or in RP-39. Vitamin A supplementation may delay onset of disease and slow progression. An electrical implant known as the Argus II retinal implant was recently approved for use, but it only offers minimal improvement in vision in patients with RP. The best visual acuity achieved in trials by the device was 20/1260 (legal blindness is defined as 20/200 vision). In addition, current gene therapy delivery techniques are not able to deliver genes encoding large proteins, e.g., the USH2A gene.

[0253] In the retina, the USH2A gene is expressed in retinal photoreceptor (PR) rods and cones. Photorecptors cells have an outer segment made of a cilium that plays an important role in the retinoid cycle and the phototransduction cascade. The USH2A gene encodes the usherin protein that is responsible for protein trafficking in the PR outer segment. Mutations in the USH2A gene leads to interrupted protein transport between the ciliary inner segment and outer segment. This causes PR dysfunction and eventual loss of vision in retinitis pigmentosa.

[0254] As RP progresses, PR rods generally degenerate first. In most cases of RP, rod photoreceptor cells function poorly and begin to die at the earliest stages of disease, resulting in poor night vision and declining peripheral vision. PR cones generally degenerate late in the course of disease. This causes the typical phenotypic progression experienced by RP patients. They experience loss of peripheral visual fields followed by loss of central visual fields (the latter measured by decreases in visual acuity).

[0255] Correction of the USH2A gene (e.g., insertion of the deleted guanine residue at nucleotide position 2299) in the eye may delay disease progression or improve in vision, or both. Restoring functional usherin to PR rods and cones is predicted to preserve communication and functioning within PR cells. This may delay or prevent PR cell death in subjects with Usher syndrome type 2 and RP39. Following correction of the USH2A gene, subjects can experience delayed disease progression and/or improvements in vision.

[0256] In the inner ear, the USH2A gene is expressed in inner and outer hair cells. Hair cells are responsible for mechanotransduction within the inner ear, a process in which sound waves are converted to electrical signals that are picked up by neurons in the inner ear and converted into sounds. Stereocilia within hair cells rely on functional usherin to interact with myosin 7A, whirlin and harmonin proteins for effective mechanotransduction (see Adato et al., Human Molecular Genetics 2005; 14(24):3921-3932, in particular, FIG. 6). Truncated or errant splicing of harmonin leads to dysfunction of the interconnections of harmonin and other stereociliary proteins, which leads to disruption in hearing.

[0257] Correction of the USH2A gene in the inner ear can delay progression of hearing loss or improve hearing or both. Following correction of the USH2A gene, subjects can experience delayed disease progression and/or improvements in hearing.

[0258] As disclosed herein, USH2A mutations may be corrected by gene editing, e.g., using CRISPR-Cas9 mediated methods to correct the guanine deletion at position 2299 in the USH2A gene (i.e., replace the deleted guanine residue at position 2299 in the USH2A gene).

[0259] Described herein are methods for treating or delaying the onset or progression of Usher syndrome type 2A and/or retinitis pigmentosa 39 (RP39), e.g., caused by mutations in the USH2A gene, including but not limited to the mutations: c.2299delG. The disclosed methods for treating or delaying the onset or progression of Usher type 2A and/or RP39 alter the USH2A gene by genome editing using a gRNA targeting the Usher type 2A and/or RP39 target position and a Cas9 enzyme. Details on gRNAs targeting the Usher type 2A and/or RP39 target position and Cas9 enzymes are provided below.

[0260] In a method disclosed herein, a mutation is targeted by cleaving with either a single nuclease or dual nickase, e.g., to induce HDR with a donor template, that corrects the point mutation (e.g., the single nucleotide, e.g., guanine, deletion). The method can include acquiring knowledge of the mutation carried by the subject, e.g., by sequencing the appropriate portion of the USH2A gene.

[0261] Usher syndrome involves, e.g., hearing loss and a progressive decline in visual acuity and treatment during the earlier stages of the disease may prevent further decline in visual acuity. Some subjects with Usher syndrome may benefit from treatment at later stages of the disease. Physicians detecting hearing loss or loss of visual acuity in a young subject may consider determining or acquiring the relevant USH2A sequence in the subject to determine whether the hearing loss or loss of visual acuity is due to a mutation in the USH2A gene. If so, the subject may be a candidate for treatment.

[0262] In an embodiment, treatment is initiated prior to onset of the disease.

[0263] In an embodiment, treatment is initiated after onset of the disease.

[0264] In an embodiment, treatment is initiated prior to loss of visual acuity.

[0265] In an embodiment, treatment is initiated at onset of loss of visual acuity.

[0266] In an embodiment, treatment is initiated after onset of loss of visual acuity.

[0267] In an embodiment, treatment is initiated prior to loss of hearing.

[0268] In an embodiment, treatment is initiated at onset of loss of hearing.

[0269] In an embodiment, treatment is initiated after onset of loss of hearing.

[0270] In an embodiment, the subject undergoes genetic testing and is found to have a mutation in the USH2A gene.

[0271] In an embodiment, treatment is initiated at the appearance of any of the following symptoms: declining peripheral vision, poor night vision or night blindness, progressive visual loss, and/or progression constriction of the visual field.

[0272] In an embodiment, treatment is initiated before the appearance of any of the following symptoms: declining peripheral vision, poor night vision or night blindness, progressive visual loss, and/or progression constriction of the visual field.

[0273] In an embodiment, treatment is initiated after the appearance of any of the following symptoms: declining peripheral vision, poor night vision or night blindness, progressive visual loss, and/or progression constriction of the visual field.

[0274] In an embodiment, treatment is initiated at the appearance of any of the following findings consistent with Usher syndrome or RP on exam, including but not limited to, bone spicule pigmentation, narrowing of the visual fields, retinal atrophy, attenuated retinal vasculature, loss of retinal pigment epithelium, and/or pallor of the optic nerve.

[0275] In an embodiment, treatment is initiated before the appearance of any of the following findings consistent with Usher syndrome or RP on exam, including but not limited to, bone spicule pigmentation, narrowing of the visual fields, retinal atrophy, attenuated retinal vasculature, loss of retinal pigment epithelium, and/or pallor of the optic nerve.

[0276] In an embodiment, treatment is initiated after the appearance of any of the following findings consistent with Usher syndrome or RP on exam, including but not limited to, bone spicule pigmentation, narrowing of the visual fields, retinal atrophy, attenuated retinal vasculature, loss of retinal pigment epithelium, and/or pallor of the optic nerve.

[0277] In an embodiment, treatment is initiated at the appearance of any of the following symptoms: hearing loss, hearing impairment, reduced hearing, and/or profound deafness.

[0278] In an embodiment, treatment is initiated before the appearance of any of the following symptoms: hearing loss, hearing impairment, reduced hearing, and/or profound deafness.

[0279] In an embodiment, treatment is initiated after the appearance of any of the following symptoms: hearing loss, hearing impairment, reduced hearing, and/or profound deafness.

[0280] In an embodiment, treatment is initiated at the appearance of any of the following findings consistent with hearing loss on exam, including but not limited to, down-sloping configuration on audiogram, hearing loss on otoacoustic emissions (OAE) test, and/or hearing loss on Electrocochleography.

[0281] In an embodiment, treatment is initiated before the appearance of any of the following findings consistent with hearing loss on exam, including but not limited to, down-sloping configuration on audiogram, hearing loss on otoacoustic emissions (OAE) test, and/or hearing loss on Electrocochleography.

[0282] In an embodiment, treatment is initiated after the appearance of any of the following findings consistent with hearing loss on exam, including but not limited to, down-sloping configuration on audiogram, hearing loss on otoacoustic emissions (OAE) test, and/or hearing loss on Electrocochleography.

[0283] In an embodiment, treatment is initiated between the ages of 10 and 20.

[0284] In an embodiment, treatment is initiated prior to the age of 10.

[0285] In an embodiment, treatment is initiated prior to the age of 20.

[0286] In an embodiment, treatment is initiated after the age of 20.

[0287] In an embodiment, treatment is initiated after the age of 30.

[0288] In an embodiment, treatment is initiated after the age of 40.

[0289] In an embodiment, treatment is initiated after the age of 50.

[0290] In an embodiment, treatment is initiated after the age of 60.

[0291] In an embodiment, treatment is initiated at the appearance of loss of visual acuity in a subject's first two decades of life.

[0292] In an embodiment, treatment is initiated at the appearance of loss of hearing in a subject's first two decades of life.

[0293] In an embodiment, treatment is initiated after a subject is determined to have a mutation, e.g., a guanine deletion at position 2299in USH2A by genetic screening, e.g., genotyping, wherein the genetic testing was performed prior to or after disease onset.

[0294] A subject's vision can be evaluated, e.g., prior to treatment, or after treatment, e.g., to monitor the progress of the treatment. In an embodiment, a subject's vision is evaluated prior to treatment, e.g., to determine the need for treatment. In an embodiment, a subject's vision is evaluated after treatment has been initiated, e.g., to access the effectiveness of the treatment. Vision can be evaluated by one or more of: evaluating changes in function relative to the contralateral eye, e.g., by utilizing retinal analytical techniques; by evaluating mean, median and distribution of change in best corrected visual acuity (BCVA); evaluation by Optical Coherence Tomography; evaluation of changes in visual field using perimetry; evalulation by full-field electroretinography (ERG); evaluation by slit lamp examination; evaluation of intraocular pressure; evaluation of autofluorescence, evaluation with fundoscopy; evaluation with fundus photography; evaluation with fluorescein angiography (FA); or evaluation of visual field sensitivity (FFST).

[0295] A subject's hearing can be evaluated, e.g., prior to treatment, or after treatment, e.g., to monitor the progress of the treatment. In an embodiment, a subject's hearing is evaluated prior to treatment, e.g., to determine the need for treatment. In an embodiment, a subject's hearing is evaluated after treatment has been initiated, e.g., to access the effectiveness of the treatment. Hearing can be evaluated by one or more of: evaluating changes in function relative to the contralateral ear, e.g., by evaluating by physical exam, e.g., by evaluating by audiogram, e.g., by evaluating by otoacoustic emissions (OAE) test, e.g., by evaluating by electrocochleography.

[0296] Methods of Altering USH2A

[0297] As disclosed herein, USH2A mutations can be corrected by gene editing, e.g., using CRISPR-Cas9 mediated methods to correct a mutation in the USH2A gene, e.g., the guanine deletion at position 2299 in the USH2A gene (e.g., replace the deleted guanine residue at position 2299 in the USH2A gene).

[0298] In a method disclosed herein, a mutation is targeted by cleaving with either one or more nuclease, one or more nickase, or a combination thereof, e.g., to induce HDR with a donor template that corrects the point mutation (e.g., the single nucleotide, e.g., guanine, deletion). The method can include acquiring knowledge of the mutation carried by the subject, e.g., by sequencing the appropriate portion of the USH2A gene.

[0299] Methods and compositions discussed herein, provide for altering the USH2A target position in the USH2A gene. USH2A target position can be altered (e.g., corrected) by gene editing, e.g., using CRISPR-Cas9 mediated methods to correct a mutation in the USH2A gene, e.g., the guanine deletion at position 2299 in the USH2A gene (e.g., replace the deleted guanine residue at position 2299, e.g., 2299delG in the USH2A gene).

[0300] The alteration (e.g., correction) of the mutant USH2A gene can be mediated by any mechanism. Exemplary mechanisms that can be associated with the alteration (e.g., correction) of the mutatnt HSH2A gene include, but are not limited to, non-homologous end joining (e.g., classical or alternative), microhomology-mediated end joining (MMEJ), homology-directed repair (e.g., endogenous donor template mediated), SDSA (synthesis dependent strand annealing), single strand annealing or single strand invasion.

[0301] The methods and compositions described herein introduce one or more breaks near the target position (e.g., 2299delG) in the USH2A gene. In an embodiment, a mutation (e.g., 2299delG) is targeted by cleaving with either one or more nucleases, one or more nickases or any combination thereof to induce HDR with a donor template that corrects the point mutation (e.g., the single nucleotide, e.g., guanine, deletion, e.g., 2299delG). The method can include acquiring knowledge of the mutation carried by the subject, e.g., by sequencing the appropriate portion of the USH2A gene.

[0302] In an embodiment, guide RNAs were designed to target a mutation (e.g., 2299delG) in the USH2A gene. A single gRNA with a Cas9 nuclease or a Cas9 nickase could be used to generate a break (e.g., a single strand break or a double strand break) in close proximity to a mutation (e.g., 2299delG). While not bound by theory, in an embodiment, it is believed that HDR-mediated repair (e.g., with a donor template) of the break (e.g., a single strand break or a double strand break) allows for the correction of the mutation (e.g., 2299delG) which results in restoration of a functional usherin protein.

[0303] In another embodiment, two gRNAs with two Cas9 nickases could be used to generate two single strand breaks in close proximity to a mutation (e.g., 2299delG). While not bound by theory, in an embodiment, it is believed that HDR-mediated repair (e.g., with a donor template) of the breaks (e.g., the two single strand breaks) allow for the correction of the mutation (e.g., 2299delG) which results in restoration of a functional usherin protein.

[0304] In another embodiment, more than two gRNAs may be used in a dual-targeting approach to generate two sets of breaks (e.g., two double strand breaks, one double strand break and a pair of single strand breaks or two pairs of single strand breaks) in close proximity to a mutation (e.g., 2299delG) or delete a genomic sequence containing a mutation (e.g., 2299delG) in the USH2A gene. While not bound by theory, in an embodiment, it is believed that HDR-mediated repair (e.g., with a donor template) of the breaks (e.g., two double strand breaks, one double strand break and a pair of single strand breaks or two pairs of single strand breaks) allow for the correction of the mutation (e.g., 2299delG) which results in restoration of a functional usherin protein.

[0305] In an embodiment, a single strand break is introduced (e.g., positioned by one gRNA molecules) in close proximity to a mutation (e.g., 2299delG) in the USH2A gene. In an embodiment, when a single gRNA molecule is used to target a Cas9 nickase to create a single strand break in close proximity to the mutation, e.g., the gRNA is used to target either upstream of (e.g., within 200 by upstream of the mutation), or downstream of (e.g., within 200 by downstream of the mutation) in the USH2A gene. In an embodiment, the break is positioned to avoid unwanted target chromosome elements, such as repeat elements, e.g., an Alu repeat.

[0306] In an embodiment, a double strand break is introduced (e.g., positioned by one gRNA molecules) in close proximity to a mutation (e.g., 2299delG) in the USH2A gene. In an embodiment, when a single gRNA molecule is used to target a Cas9 nuclease to create a double strand break in close proximity to the mutation, e.g., the gRNA is used to target either upstream of (e.g., within 200 by upstream of the mutation), or downstream of (e.g., within 200 by downstream of the mutation) in the USH2A gene. In an embodiment, the break is positioned to avoid unwanted target chromosome elements, such as repeat elements, e.g., an Alu repeat.

[0307] In an embodiment, two single strand breaks are introduced (e.g., positioned by two gRNA molecules) in close proximity to a mutation (e.g., 2299delG) in the USH2A gene. In an embodiment, when two gRNA molecules are used to target two Cas9 nickcases to create two single strand breaks in close proximity to the mutation, e.g., both gRNAs are used to target upstream of (e.g., within 200 by upstream of the mutation), both gRNAs are used to target downstream of (e.g., within 200 by downstream of the mutation), or one is upstream (e.g., within 200 by upstream of the mutation) and the second one is downstream (e.g., within 200 by downstream of the mutation) of the mutation (e.g., 2299delG) in the USH2A gene. In an embodiment, the break is positioned to avoid unwanted target chromosome elements, such as repeat elements, e.g., an Alu repeat.

[0308] In an embodiment, two sets of breaks (e.g., two double strand breaks) are introduced (e.g., positioned by two gRNA molecules) in close proximity to a mutation (e.g., 2299delG) in the USH2A gene. In an embodiment, two gRNA molecule are used to target two Cas9 nucleases to create two double strand breaks to flank a mutation (e.g., 2299delG), e.g., one gRNA is used to target upstream of (e.g., within 200 by upstream of the mutation) while a second gRNA is used to target downstream of (e.g., within 200 by downstream of the mutation) of a mutation (e.g., 2299delG) in the USH2A gene. In an embodiment, the breaks are positioned to avoid unwanted target chromosome elements, such as repeat elements, e.g., an Alu repeat.

[0309] In an embodiment, two sets of breaks (e.g., one double strand break and a pair of nickases) are introduced (e.g., positioned by three gRNA molecules) in close proximity to a mutation (e.g., 2299delG) in the USH2A gene. In an embodiment, three gRNA molecules are used to target three Cas9 molecules to create two sets of breaks (e.g., one double strand break and a pair of nickases)) to flank a mutation (e.g., 2299delG), e.g., one gRNA molecule is used to target upstream or downstream of (e.g., within 200 by upstream or downstream of the mutation) while a second and a third gRNA molecules are used to target the opposite site (e.g., within 200 by downstream or upstream) of of a mutation (e.g., 2299delG) in the USH2A gene. In an embodiment, the breaks are positioned to avoid unwanted target chromosome elements, such as repeat elements, e.g., an Alu repeat.

[0310] In an embodiment, two sets of breaks (e.g., two pairs of strand breaks) are introduced (e.g., positioned by four gRNA molecules) in close proximity to a mutation (e.g., 2299delG) in the USH2A gene. In an embodiment, four gRNA molecule are used to target four Cas9 nickases to create two pairs of single strand breaks to flank a mutation (e.g., 2299delG), e.g., one and a second gRNA molecules are used to target upstream of (e.g., within 200 by upstream of the mutation) while a third and a fourth gRNA molecules are used to target downstream of (e.g., within 200 by downstream of the mutation) of a mutation (e.g., 2299delG) in the USH2A gene. In an embodiment, the breaks are positioned to avoid unwanted target chromosome elements, such as repeat elements, e.g., an Alu repeat.

[0311] When two gRNAs designed for use to target two Cas9 enzymes, one Cas9 can be one species, the second Cas9 can be from a different species. Both Cas9 species are used to generate a single or double-strand break, as desired.

I. sRNA Molecules

[0312] A gRNA molecule, as that term is used herein, refers to a nucleic acid that promotes the specific targeting or homing of a gRNA molecule/Cas9 molecule complex to a target nucleic acid. gRNA molecules can be unimolecular (having a single RNA molecule), sometimes referred to hereins as “chimeric” gRNAs, or modular (comprising more than one, and typically two, separate RNA molecules). A gRNA molecule comprises a number of domains. The gRNA molecule domains are described in more detail below.

[0313] Several exemplary gRNA structures, with domains indicated thereon, are provided in FIG. 1A-1G. While not wishing to be bound by theory, in an embodiment, with regard to the three dimensional form, or intra- or inter-strand interactions of an active form of a gRNA, regions of high complementarity are sometimes shown as duplexes in FIGS. 1A-1G and other depictions provided herein.

[0314] In an embodiment, a unimolecular, or chimeric, gRNA comprises, preferably from 5′ to 3′:
[0315] a targeting domain (which is complementary to a target nucleic acid in the USH2A gene, e.g., a targeting domain from any of Tables 1-3, 4A-4E, 5A-5F, or 6A-6D;
[0316] a first complementarity domain;
[0317] a linking domain;
[0318] a second complementarity domain (which is complementary to the first complementarity domain);
[0319] a proximal domain; and
[0320] optionally, a tail domain.

[0321] In an embodiment, a modular gRNA comprises:
[0322] a first strand comprising, preferably from 5′ to 3′;
   [0323] a targeting domain (which is complementary to a target nucleic acid in the USH2A gene, e.g., a targeting domain from any of Tables 1-3, 4A-4E, 5A-5F, or 6A-6D; and
   [0324] a first complementarity domain; and
[0325] a second strand, comprising, preferably from 5′ to 3′:
   [0326] optionally, a 5′ extension domain;
   [0327] a second complementarity domain;
   [0328] a proximal domain; and
   [0329] optionally, a tail domain.

[0330] The domains are discussed briefly below:

[0331] The Targeting Domain

[0332] FIGS. 1A-1G provide examples of the placement of targeting domains.

[0333] The targeting domain comprises a nucleotide sequence that is complementary, e.g., at least 80, 85, 90, or 95% complementary, e.g., fully complementary, to the target sequence on the target nucleic acid. The targeting domain is part of an RNA molecule and therefore comprises the base uracil (U), while any DNA encoding the gRNA molecule comprises the base thymine (T). While not wishing to be bound by theory, in an embodiment, it is believed that the complementarity of the targeting domain with the target sequence contributes to specificity of the interaction of the gRNA molecule/Cas9 molecule complex with a target nucleic acid. It is understood that in a targeting domain and target sequence pair, the uracil bases in the targeting domain will pair with the adenine bases in the target sequence. In an embodiment, the target domain itself comprises two domains, which are, in the 5′ to 3′ direction, an optional secondary domain, and a core domain. In an embodiment, the core domain is fully complementary with the target sequence. In an embodiment, the targeting domain is 5 to 50 nucleotides in length. The strand of the target nucleic acid with which the targeting domain is complementary is referred to herein as the complementary strand. Some or all of the nucleotides of the domain can have a modification, e.g., a modification found in Section VIII herein.

[0334] In an embodiment, the targeting domain is 16 nucleotides in length.

[0335] In an embodiment, the targeting domain is 17 nucleotides in length.

[0336] In an embodiment, the targeting domain is 18 nucleotides in length.

[0337] In an embodiment, the targeting domain is 19 nucleotides in length.

[0338] In an embodiment, the targeting domain is 20 nucleotides in length.

[0339] In an embodiment, the targeting domain is 21 nucleotides in length.

[0340] In an embodiment, the targeting domain is 22 nucleotides in length.

[0341] In an embodiment, the targeting domain is 23 nucleotides in length.

[0342] In an embodiment, the targeting domain is 24 nucleotides in length.

[0343] In an embodiment, the targeting domain is 25 nucleotides in length.

[0344] In an embodiment, the targeting domain is 26 nucleotides in length.

[0345] In an embodiment, the targeting domain comprises 16 nucleotides.

[0346] In an embodiment, the targeting domain comprises 17 nucleotides.

[0347] In an embodiment, the targeting domain comprises 18 nucleotides.

[0348] In an embodiment, the targeting domain comprises 19 nucleotides.

[0349] In an embodiment, the targeting domain comprises 20 nucleotides.

[0350] In an embodiment, the targeting domain comprises 21 nucleotides.

[0351] In an embodiment, the targeting domain comprises 22 nucleotides.

[0352] In an embodiment, the targeting domain comprises 23 nucleotides.

[0353] In an embodiment, the targeting domain comprises 24 nucleotides.

[0354] In an embodiment, the targeting domain comprises 25 nucleotides.

[0355] In an embodiment, the targeting domain comprises 26 nucleotides.

[0356] Targeting domains are discussed in more detail below.

[0357] The First Complementarity Domain

[0358] FIGS. 1A-1G provide examples of first complementarity domains.

[0359] The first complementarity domain is complementary with the second complementarity domain, and in an embodiment, has sufficient complementarity to the second complementarity domain to form a duplexed region under at least some physiological conditions. In an embodiment, the first complementarity domain is 5 to 30 nucleotides in length. In an embodiment, the first complementarity domain is 5 to 25 nucleotides in length. In an embodiment, the first complementary domain is 7 to 25 nucleotides in length. In an embodiment, the first complementary domain is 7 to 22 nucleotides in length. In an embodiment, the first complementary domain is 7 to 18 nucleotides in length. In an embodiment, the first complementary domain is 7 to 15 nucleotides in length. In an embodiment, the first complementary domain is 5, 6, 7, 8, 9, 10, 11, 12, 13, 14, 15, 16, 17, 18, 19, 20, 21, 22, 23, 24, or 25 nucleotides in length.

[0360] In an embodiment, the first complementarity domain comprises 3 subdomains, which, in the 5′ to 3′ direction are: a 5′ subdomain, a central subdomain, and a 3′ subdomain. In an embodiment, the 5′ subdomain is 4-9, e.g., 4, 5, 6, 7, 8 or 9 nucleotides in length. In an embodiment, the central subdomain is 1, 2, or 3, e.g., 1, nucleotide in length. In an embodiment, the 3′ subdomain is 3 to 25, e.g., 4-22, 4-18, or 4 to 10, or 3, 4, 5, 6, 7, 8, 9, 10, 11, 12, 13, 14, 15, 16, 17, 18. 19, 20, 21, 22, 23, 24, or 25, nucleotides in length.

[0361] The first complementarity domain can share homology with, or be derived from, a naturally occurring first complementarity domain. In an embodiment, it has at least 50% homology with a first complementarity domain disclosed herein, e.g., an S. pyogenes, S. aureus or S. thermophilus, first complementarity domain.

[0362] Some or all of the nucleotides of the domain can have a modification, e.g., modification found in Section VIII herein.

[0363] First complementarity domains are discussed in more detail below.

[0364] The Linking Domain

[0365] FIGS. 1A-1G provide examples of linking domains.

[0366] A linking domain serves to link the first complementarity domain with the second complementarity domain of a unimolecular gRNA. The linking domain can link the first and second complementarity domains covalently or non-covalently. In an embodiment, the linkage is covalent. In an embodiment, the linking domain covalently couples the first and second complementarity domains, see, e.g., FIGS. 1B-1E. In an embodiment, the linking domain is, or comprises, a covalent bond interposed between the first complementarity domain and the second complementarity domain. Typically the linking domain comprises one or more, e.g., 2, 3, 4, 5, 6, 7, 8, 9, or 10 nucleotides.

[0367] In modular gRNA molecules the two molecules are associated by virtue of the hybridization of the complementarity domains see e.g., FIG. 1A.

[0368] A wide variety of linking domains are suitable for use in unimolecular gRNA molecules. Linking domains can consist of a covalent bond, or be as short as one or a few nucleotides, e.g., 1, 2, 3, 4, or 5 nucleotides in length. In an embodiment, a linking domain is 2, 3, 4, 5, 6, 7, 8, 9, 10, 15, 20, or 25 or more nucleotides in length. In an embodiment, a linking domain is 2 to 50, 2 to 40, 2 to 30, 2 to 20, 2 to 10, or 2 to 5 nucleotides in length. In an embodiment, a linking domain shares homology with, or is derived from, a naturally occurring sequence, e.g., the sequence of a tracrRNA that is 5′ to the second complementarity domain. In an embodiment, the linking domain has at least 50% homology with a linking domain disclosed herein.

[0369] Some or all of the nucleotides of the domain can have a modification, e.g., a modification found in Section VIII herein.

[0370] Linking domains are discussed in more detail below.

[0371] The 5′ Extension Domain

[0372] In an embodiment, a modular gRNA can comprise additional sequence, 5′ to the second complementarity domain, referred to herein as the 5′ extension domain, see, e.g., FIG. 1A. In an embodiment, the 5′ extension domain is 2-10, 2-9, 2-8, 2-7, 2-6, 2-5, 2-4 nucleotides in length. In an embodiment, the 5′ extension domain is 2, 3, 4, 5, 6, 7, 8, 9, or 10 or more nucleotides in length.

[0373] The Second Complementarity Domain

[0374] FIGS. 1A-1G provide examples of second complementarity domains.

[0375] The second complementarity domain is complementary with the first complementarity domain, and in an embodiment, has sufficient complementarity to the second complementarity domain to form a duplexed region under at least some physiological conditions. In an embodiment, e.g., as shown in FIGS. 1A-1B, the second complementarity domain can include sequence that lacks complementarity with the first complementarity domain, e.g., sequence that loops out from the duplexed region.

[0376] In an embodiment, the second complementarity domain is 5 to 27 nucleotides in length. In an embodiment, it is longer than the first complementarity region. In an embodiment, the second complementary domain is 7 to 27 nucleotides in length. In an embodiment, the second complementary domain is 7 to 25 nucleotides in length. In an embodiment, the second complementary domain is 7 to 20 nucleotides in length. In an embodiment, the second complementary domain is 7 to 17 nucleotides in length. In an embodiment, the complementary domain is 5, 6, 7, 8, 9, 10, 11, 12, 13, 14, 15, 16, 17, 18, 19, 20, 21, 22, 23, 24 or 25 nucleotides in length.

[0377] In an embodiment, the second complementarity domain comprises three subdomains, which, in the 5′ to 3′ direction are: a 5′ subdomain, a central subdomain, and a 3′ subdomain. In an embodiment, the 5′ subdomain is 3 to 25, e.g., 4 to 22, 4 to 18, or 4 to10, or 3, 4, 5, 6, 7, 8, 9, 10, 11, 12, 13, 14, 15, 16, 17, 18, 19, 20, 21, 22, 23, 24 or 25 nucleotides in length. In an embodiment, the central subdomain is 1, 2, 3, 4 or 5, e.g., 3, nucleotides in length. In an embodiment, the 3′ subdomain is 4 to 9, e.g., 4, 5, 6, 7, 8 or 9 nucleotides in length.

[0378] In an embodiment, the 5′ subdomain and the 3′ subdomain of the first complementarity domain, are respectively, complementary, e.g., fully complementary, with the 3′ subdomain and the 5′ subdomain of the second complementarity domain.

[0379] The second complementarity domain can share homology with or be derived from a naturally occurring second complementarity domain. In an embodiment it has at least 50% homology with a second complementarity domain disclosed herein, e.g., an S. pyogenes, S. aureus or S. thermophilus, second complementarity domain.

[0380] Some or all of the nucleotides of the domain can have a modification, e.g., modification found in Section VIII herein.

[0381] The Proximal Domain

[0382] FIGS. 1A-1G provide examples of proximal domains.

[0383] In an embodiment, the proximal domain is 5 to 20 nucleotides in length. In an embodiment, the proximal domain can share homology with or be derived from a naturally occurring proximal domain. In an embodiment, it has at least 50% homology with a proximal domain disclosed herein, e.g., an S. pyogenes, S. aureus or S. thermophilus, proximal domain.

[0384] Some or all of the nucleotides of the domain can have a modification, e.g., modification found in Section VIII herein.

[0385] The Tail Domain

[0386] FIGS. 1A-1G provide examples of tail domains.

[0387] As can be seen by inspection of the tail domains in FIGS. 1A-1G, a broad spectrum of tail domains are suitable for use in gRNA molecules. In an embodiment, the tail domain is 0 (absent), 1, 2, 3, 4, 5, 6, 7, 8, 9, or 10 nucleotides in length. In embodiment, the tail domain nucleotides are from or share homology with sequence from the 5′ end of a naturally occurring tail domain, see e.g., FIG. 1D or 1E. In an embodiment, the tail domain includes sequences that are complementary to each other and which, under at least some physiological conditions, form a duplexed region.

[0388] In an embodiment, the tail domain is absent or is 1 to 50 nucleotides in length. In an embodiment, the tail domain can share homology with or be derived from a naturally occurring proximal tail domain. In an embodiment, it has at least 50% homology with a tail domain disclosed herein, e.g., an S. pyogenes, S. aureus or S. thermophilus, tail domain.

[0389] In an embodiment, the tail domain includes nucleotides at the 3′ end that are related to the method of in vitro or in vivo transcription. When a T7 promoter is used for in vitro transcription of the gRNA, these nucleotides may be any nucleotides present before the 3′ end of the DNA template. When a U6 promoter is used for in vivo transcription, these nucleotides may be the sequence UUUUUU. When alternate pol-III promoters are used, these nucleotides may be various numbers or uracil bases or may include alternate bases.

[0390] The domains of gRNA molecules are described in more detail below.

[0391] The Targeting Domain

[0392] The “targeting domain” of the gRNA is complementary to the “target domain” on the target nucleic acid. The strand of the target nucleic acid comprising the core domain target is referred to herein as the “complementary strand” of the target nucleic acid. Guidance on the selection of targeting domains can be found, e.g., in Fu Yet al., NAT BIOTECHNOL 2014 (doi: 10.1038/nbt.2808) and Sternberg S H et al., NATURE 2014 (doi: 10.1038/nature13011).

[0393] In an embodiment, the targeting domain is 16, 17, 18, 19, 20, 21, 22, 23, 24, 25 or 26 nucleotides in length.

[0394] In an embodiment, the targeting domain is 16 nucleotides in length.

[0395] In an embodiment, the targeting domain is 17 nucleotides in length.

[0396] In an embodiment, the targeting domain is 18 nucleotides in length.

[0397] In an embodiment, the targeting domain is 19 nucleotides in length.

[0398] In an embodiment, the targeting domain is 20 nucleotides in length.

[0399] In an embodiment, the targeting domain is 21 nucleotides in length.

[0400] In an embodiment, the targeting domain is 22 nucleotides in length.

[0401] In an embodiment, the targeting domain is 23 nucleotides in length.

[0402] In an embodiment, the targeting domain is 24 nucleotides in length.

[0403] In an embodiment, the targeting domain is 25 nucleotides in length.

[0404] In an embodiment, the targeting domain is 26 nucleotides in length.

[0405] In an embodiment, the targeting domain comprises 16 nucleotides.

[0406] In an embodiment, the targeting domain comprises 17 nucleotides.

[0407] In an embodiment, the targeting domain comprises 18 nucleotides.

[0408] In an embodiment, the targeting domain comprises 19 nucleotides.

[0409] In an embodiment, the targeting domain comprises 20 nucleotides.

[0410] In an embodiment, the targeting domain comprises 21 nucleotides.

[0411] In an embodiment, the targeting domain comprises 22 nucleotides.

[0412] In an embodiment, the targeting domain comprises 23 nucleotides.

[0413] In an embodiment, the targeting domain comprises 24 nucleotides.

[0414] In an embodiment, the targeting domain comprises 25 nucleotides.

[0415] In an embodiment, the targeting domain comprises 26 nucleotides.

[0416] In an embodiment, the targeting domain is 10+/−5, 20+/−5, 30+/−5, 40+/−5, 50+/−5, 60+/−5, 70+/−5, 80+/−5, 90+/−5, or 100+/−5 nucleotides, in length.

[0417] In an embodiment, the targeting domain is 20+/−5 nucleotides in length.

[0418] In an embodiment, the targeting domain is 20+/−10, 30+/−10, 40+/−10, 50+/−10, 60+/−10, 70+/−10, 80+/−10, 90+/−10, or 100+/−10 nucleotides, in length.

[0419] In an embodiment, the targeting domain is 30+/−10 nucleotides in length.

[0420] In an embodiment, the targeting domain is 10 to 100, 10 to 90, 10 to 80, 10 to 70, 10 to 60, 10 to 50, 10 to 40, 10 to 30, 10 to 20 or 10 to 15 nucleotides in length. In other embodiments, the targeting domain is 20 to 100, 20 to 90, 20 to 80, 20 to 70, 20 to 60, 20 to 50, 20 to 40, 20 to 30, or 20 to 25 nucleotides in length.

[0421] Typically the targeting domain has full complementarity with the target sequence. In some embodiments, the targeting domain has or includes 1, 2, 3, 4, 5, 6, 7 or 8 nucleotides that are not complementary with the corresponding nucleotide of the targeting domain.

[0422] In an embodiment, the target domain includes 1, 2, 3, 4 or 5 nucleotides that are complementary with the corresponding nucleotide of the targeting domain within 5 nucleotides of its 5′ end. In an embodiment, the target domain includes 1, 2, 3, 4 or 5 nucleotides that are complementary with the corresponding nucleotide of the targeting domain within 5 nucleotides of its 3′ end.

[0423] In an embodiment, the target domain includes 1, 2, 3, or 4 nucleotides that are not complementary with the corresponding nucleotide of the targeting domain within 5 nucleotides of its 5′ end. In an embodiment, the target domain includes 1, 2, 3, or 4 nucleotides that are not complementary with the corresponding nucleotide of the targeting domain within 5 nucleotides of its 3′ end.

[0424] In an embodiment, the degree of complementarity, together with other properties of the gRNA, is sufficient to allow targeting of a Cas9 molecule to the target nucleic acid.

[0425] In some embodiments, the targeting domain comprises two consecutive nucleotides that are not complementary to the target domain (“non-complementary nucleotides”), e.g., two consecutive noncomplementary nucleotides that are within 5 nucleotides of the 5′ end of the targeting domain, within 5 nucleotides of the 3′ end of the targeting domain, or more than 5 nucleotides away from one or both ends of the targeting domain.

[0426] In an embodiment, no two consecutive nucleotides within 5 nucleotides of the 5′ end of the targeting domain, within 5 nucleotides of the 3′ end of the targeting domain, or within a region that is more than 5 nucleotides away from one or both ends of the targeting domain, are not complementary to the targeting domain.

[0427] In an embodiment, there are no non-complementary nucleotides within 5 nucleotides of the 5′ end of the targeting domain, within 5 nucleotides of the 3′ end of the targeting domain, or within a region that is more than 5 nucleotides away from one or both ends of the targeting domain.

[0428] In an embodiment, the targeting domain nucleotides do not comprise modifications, e.g., modifications of the type provided in Section VIII. However, in an embodiment, the targeting domain comprises one or more modifications, e.g., modifications that it render it less susceptible to degradation or more bio-compatible, e.g., less immunogenic. By way of example, the backbone of the targeting domain can be modified with a phosphorothioate, or other modification(s) from Section VIII. In an embodiment, a nucleotide of the targeting domain can comprise a 2′ modification, e.g., a 2-acetylation, e.g., a 2′ methylation, or other modification(s) from Section VIII.

[0429] In some embodiments, the targeting domain includes 1, 2, 3, 4, 5, 6, 7 or 8 or more modifications. In an embodiment, the targeting domain includes 1, 2, 3, or 4 modifications within 5 nucleotides of its 5′ end. In an embodiment, the targeting domain comprises as many as 1, 2, 3, or 4 modifications within 5 nucleotides of its 3′ end.

[0430] In some embodiments, the targeting domain comprises modifications at two consecutive nucleotides, e.g., two consecutive nucleotides that are within 5 nucleotides of the 5′ end of the targeting domain, within 5 nucleotides of the 3′ end of the targeting domain, or more than 5 nucleotides away from one or both ends of the targeting domain.

[0431] In an embodiment, no two consecutive nucleotides are modified within 5 nucleotides of the 5′ end of the targeting domain, within 5 nucleotides of the 3′ end of the targeting domain, or within a region that is more than 5 nucleotides away from one or both ends of the targeting domain. In an embodiment, no nucleotide is modified within 5 nucleotides of the 5′ end of the targeting domain, within 5 nucleotides of the 3′ end of the targeting domain, or within a region that is more than 5 nucleotides away from one or both ends of the targeting domain.

[0432] Modifications in the targeting domain can be selected so as to not interfere with targeting efficacy, which can be evaluated by testing a candidate modification in the system described in Section IV. gRNAs having a candidate targeting domain having a selected length, sequence, degree of complementarity, or degree of modification, can be evaluated in a system in Section IV. The candidate targeting domain can be placed, either alone, or with one or more other candidate changes in a gRNA molecule/Cas9 molecule system known to be functional with a selected target and evaluated.

[0433] In some embodiments, all of the modified nucleotides are complementary to and capable of hybridizing to corresponding nucleotides present in the target domain. In other embodiments, 1, 2, 3, 4, 5, 6, 7 or 8 or more modified nucleotides are not complementary to or capable of hybridizing to corresponding nucleotides present in the target domain.

[0434] In an embodiment, the targeting domain comprises, preferably in the 5′→3′ direction: a secondary domain and a core domain. These domains are discussed in more detail below.

[0435] The Core Domain and Secondary Domain of the Targeting Domain

[0436] The “core domain” of the targeting domain is complementary to the “core domain target” on the target nucleic acid. In an embodiment, the core domain comprises about 8 to about 13 nucleotides from the 3′ end of the targeting domain (e.g., the most 3′ 8 to 13 nucleotides of the targeting domain). In an embodiment, the secondary domain is absent or optional.

[0437] In an embodiment, the secondary domain is absent or optional.

[0438] In an embodiment, the core domain and targeting domain, are independently, 6 +/−2, 7+/−2, 8+/−2, 9+/−2, 10+/−2, 11+/−2, 12+/−2, 13+/−2, 14+/−2, 15+/−2, 16+−2, 17+/−2, or 18+/−2, nucleotides in length.

[0439] In an embodiment, the core domain anargeting domain, are independently, 10+/−2 nucleotides in length.

[0440] In an embodiment, the core domain and targeting domain are independently 10+/−4 nucleotides in length.

[0441] In an embodiment, the core domain and targeting domain are independently 6, 7, 8, 9, 10, 11, 12, 13, 14, 15, 16, 17, or 18, nucleotides in length.

[0442] In an embodiment, the core domain and targeting domain are independently 3 to 20, 4 to 20, 5 to 20, 6 to 20, 7 to 20, 8 to 20, 9 to 20 10 to 20 or 15 to 20 nucleotides in length.

[0443] In an embodiment, the core domain and targeting domain are independently 3 to 15, e.g., 6 to 15, 7 to 14, 7 to 13, 6 to 12, 7 to 12, 7 to 11, 7 to 10, 8 to 14, 8 to 13, 8 to 12, 8 to 11, 8 to 10 or 8 to 9 nucleotides in length.

[0444] The core domain is complementary with the core domain target. Typically the core domain has exact complementarity with the core domain target. In some embodiments, the core domain can have 1, 2, 3, 4 or 5 nucleotides that are not complementary with the corresponding nucleotide of the core domain. In an embodiment, the degree of complementarity, together with other properties of the gRNA, is sufficient to allow targeting of a Cas9 molecule to the target nucleic acid.

[0445] The “secondary domain” of the targeting domain of the gRNA is complementary to the “secondary domain target” of the target nucleic acid.

[0446] In an embodiment, the secondary domain is positioned 5′ to the core domain.

[0447] In an embodiment, the secondary domain is absent or optional.

[0448] In an embodiment, if the targeting domain is 26 nucleotides in length and the core domain (counted from the 3′ end of the targeting domain) is 8 to 13 nucleotides in length, the secondary domain is 12 to 17 nucleotides in length.

[0449] In an embodiment, if the targeting domain is 25 nucleotides in length and the core domain (counted from the 3′ end of the targeting domain) is 8 to 13 nucleotides in length, the secondary domain is 12 to 17 nucleotides in length.

[0450] In an embodiment, if the targeting domain is 24 nucleotides in length and the core domain (counted from the 3′ end of the targeting domain) is 8 to 13 nucleotides in length, the secondary domain is 11 to 16 nucleotides in length.

[0451] In an embodiment, if the targeting domain is 23 nucleotides in length and the core domain (counted from the 3′ end of the targeting domain) is 8 to 13 nucleotides in length, the secondary domain is 10 to 15 nucleotides in length.

[0452] In an embodiment, if the targeting domain is 22 nucleotides in length and the core domain (counted from the 3′ end of the targeting domain) is 8 to 13 nucleotides in length, the secondary domain is 9 to 14 nucleotides in length.

[0453] In an embodiment, if the targeting domain is 21 nucleotides in length and the core domain (counted from the 3′ end of the targeting domain) is 8 to 13 nucleotides in length, the secondary domain is 8 to 13 nucleotides in length.

[0454] In an embodiment, if the targeting domain is 20 nucleotides in length and the core domain (counted from the 3′ end of the targeting domain) is 8 to 13 nucleotides in length, the secondary domain is 7 to 12 nucleotides in length.

[0455] In an embodiment, if the targeting domain is 19 nucleotides in length and the core domain (counted from the 3′ end of the targeting domain) is 8 to 13 nucleotides in length, the secondary domain is 6 to 11 nucleotides in length.

[0456] In an embodiment, if the targeting domain is 18 nucleotides in length and the core domain (counted from the 3′ end of the targeting domain) is 8 to 13 nucleotides in length, the secondary domain is 5 to 10 nucleotides in length.

[0457] In an embodiment, if the targeting domain is 17 nucleotides in length and the core domain (counted from the 3′ end of the targeting domain) is 8 to 13 nucleotides in length, the secondary domain is 4 to 9 nucleotides in length.

[0458] In an embodiment, if the targeting domain is 16 nucleotides in length and the core domain (counted from the 3′ end of the targeting domain) is 8 to 13 nucleotides in length, the secondary domain is 3 to 8 nucleotides in length.

[0459] In an embodiment, the secondary domain is 0, 1, 2, 3, 4, 5, 6, 7, 8, 9, 10, 11, 12, 13, 14 or 15 nucleotides in length.

[0460] The secondary domain is complementary with the secondary domain target. Typically the secondary domain has exact complementarity with the secondary domain target. In some embodiments the secondary domain can have 1, 2, 3, 4 or 5 nucleotides that are not complementary with the corresponding nucleotide of the secondary domain. In an embodiment, the degree of complementarity, together with other properties of the gRNA, is sufficient to allow targeting of a Cas9 molecule to the target nucleic acid.

[0461] In an embodiment, the core domain nucleotides do not comprise modifications, e.g., modifications of the type provided in Section VIII. However, in an embodiment, the core domain comprise one or more modifications, e.g., modifications that it render it less susceptible to degradation or more bio-compatible, e.g., less immunogenic. By way of example, the backbone of the core domain can be modified with a phosphorothioate, or other modification(s) from Section VIII. In an embodiment a nucleotide of the core domain can comprise a 2′ modification, e.g., a 2-acetylation, e.g., a 2′ methylation, or other modification(s) from Section VIII. Typically, a core domain will contain no more than 1, 2, or 3 modifications.

[0462] Modifications in the core domain can be selected so as to not interfere with targeting efficacy, which can be evaluated by testing a candidate modification in the system described in Section IV. gRNAs having a candidate core domain having a selected length, sequence, degree of complementarity, or degree of modification, can be evaluated in the system described at Section IV. The candidate core domain can be placed, either alone, or with one or more other candidate changes in a gRNA molecule/Cas9 molecule system known to be functional with a selected target and evaluated.

[0463] In an embodiment, the secondary domain nucleotides do not comprise modifications, e.g., modifications of the type provided in Section VIII. However, in an embodiment, the secondary domain comprises one or more modifications, e.g., modifications that it render it less susceptible to degradation or more bio-compatible, e.g., less immunogenic. By way of example, the backbone of the secondary domain can be modified with a phosphorothioate, or other modification(s) from Section VIII. In an embodiment a nucleotide of the secondary domain can comprise a 2′ modification, e.g., a 2-acetylation, e.g., a 2′ methylation, or other modification(s) from Section VIII. Typically, a secondary domain will contain no more than 1, 2, or 3 modifications.

[0464] Modifications in the secondary domain can be selected so as to not interfere with targeting efficacy, which can be evaluated by testing a candidate modification in the system described in Section IV. gRNAs having a candidate secondary domain having a selected length, sequence, degree of complementarity, or degree of modification, can be evaluated in the system described at Section IV. The candidate secondary domain can be placed, either alone, or with one or more other candidate changes in a gRNA molecule/Cas9 molecule system known to be functional with a selected target and evaluated.

[0465] In an embodiment, (1) the degree of complementarity between the core domain and its target, and (2) the degree of complementarity between the secondary domain and its target, may differ. In an embodiment, (1) may be greater (2). In an embodiment, (1) may be less than (2). In an embodiment, (1) and (2) may be the same, e.g., each may be completely complementary with its target.

[0466] In an embodiment, (1) the number of modification (e.g., modifications from Section VIII) of the nucleotides of the core domain and (2) the number of modification (e.g., modifications from Section VIII) of the nucleotides of the secondary domain, may differ. In an embodiment, (1) may be less than (2). In an embodiment, (1) may be greater than (2). In an embodiment, (1) and (2) may be the same, e.g., each may be free of modifications.

[0467] The First and Second Complementarity Domains

[0468] The first complementarity domain is complementary with the second complementarity domain.

[0469] Typically the first domain does not have exact complementarity with the second complementarity domain target. In some embodiments, the first complementarity domain can have 1, 2, 3, 4 or 5 nucleotides that are not complementary with the corresponding nucleotide of the second complementarity domain. In an embodiment, 1, 2, 3, 4, 5 or 6, e.g., 3 nucleotides, do not pair in the duplex, and, e.g., form a non-duplexed or looped-out region. In an embodiment an unpaired, or loop-out, region, e.g., a loop-out of 3 nucleotides, is present on the second complementarity domain. In an embodiment, the unpaired region begins 1, 2, 3, 4, 5, or 6, e.g., 4, nucleotides from the 5′ end of the second complementarity domain.

[0470] In an embodiment, the degree of complementarity, together with other properties of the gRNA, is sufficient to allow targeting of a Cas9 molecule to the target nucleic acid.

[0471] In an embodiment, the first and second complementarity domains are:

[0472] independently, 6+/−2, 7+/−2, 8+/−2, 9+/−2, 10+/−2, 11+/−2, 12+/−2, 13+/−2, 14+/−2, 15+/−2, 16+/−2, 17+/−2, 18+/−2, 19+/−2, or 20+/−2, 21+/−2, 22+/−2, 23+/−2, or 24+/−2 nucleotides in length;

[0473] independently, 6, 7, 8, 9, 10, 11, 12, 13, 14, 14, 16, 17, 18, 19, 20, 21, 22, 23, 24, 25, or 26, nucleotides in length;

[0474] independently, 5 to 24, 5 to 23, 5 to 22, 5 to 21, 5 to 20, 7 to 18, 9 to 16, or 10 to 14 nucleotides in length.

[0475] In an embodiment, the second complementarity domain is longer than the first complementarity domain, e.g., 2, 3, 4, 5, or 6, e.g., 6, nucleotides longer.

[0476] In an embodiment, the first and second complementary domains, independently, do not comprise modifications, e.g., modifications of the type provided in Section VIII.

[0477] In an embodiment, the first and second complementary domains, independently, comprise one or more modifications, e.g., modifications that the render the domain less susceptible to degradation or more bio-compatible, e.g., less immunogenic. By way of example, the backbone of the domain can be modified with a phosphorothioate, or other modification(s) from Section VIII. In an embodiment a nucleotide of the domain can comprise a 2′ modification, e.g., a 2-acetylation, e.g., a 2′ methylation, or other modification(s) from Section VIII.

[0478] In an embodiment, the first and second complementary domains, independently, include 1, 2, 3, 4, 5, 6, 7 or 8 or more modifications. In an embodiment, the first and second complementary domains, independently, include 1, 2, 3, or 4 modifications within 5 nucleotides of its 5′ end. In an embodiment, the first and second complementary domains, independently, include as many as 1, 2, 3, or 4 modifications within 5 nucleotides of its 3′ end.

[0479] In an embodiment, the first and second complementary domains, independently, include modifications at two consecutive nucleotides, e.g., two consecutive nucleotides that are within 5 nucleotides of the 5′ end of the domain, within 5 nucleotides of the 3′ end of the domain, or more than 5 nucleotides away from one or both ends of the domain. In an embodiment, the first and second complementary domains, independently, include no two consecutive nucleotides that are modified, within 5 nucleotides of the 5′ end of the domain, within 5 nucleotides of the 3′ end of the domain, or within a region that is more than 5 nucleotides away from one or both ends of the domain. In an embodiment, the first and second complementary domains, independently, include no nucleotide that is modified within 5 nucleotides of the 5′ end of the domain, within 5 nucleotides of the 3′ end of the domain, or within a region that is more than 5 nucleotides away from one or both ends of the domain.

[0480] Modifications in a complementarity domain can be selected so as to not interfere with targeting efficacy, which can be evaluated by testing a candidate modification in the system described in Section IV. gRNAs having a candidate complementarity domain having a selected length, sequence, degree of complementarity, or degree of modification, can be evaluated in the system described in Section IV. The candidate complementarity domain can be placed, either alone, or with one or more other candidate changes in a gRNA molecule/Cas9 molecule system known to be functional with a selected target and evaluated.

[0481] In an embodiment, the first complementarity domain has at least 60, 70, 80, 85%, 90% or 95% homology with, or differs by no more than 1, 2, 3, 4, 5, or 6 nucleotides from, a reference first complementarity domain, e.g., a naturally occurring, e.g., an S. pyogenes, S. aureus or S. thermophilus, first complementarity domain, or a first complementarity domain described herein, e.g., from FIGS. 1A-1G.

[0482] In an embodiment, the second complementarity domain has at least 60, 70, 80, 85%, 90%, or 95% homology with, or differs by no more than 1, 2, 3, 4, 5, or 6 nucleotides from, a reference second complementarity domain, e.g., a naturally occurring, e.g., an S. pyogenes, S. aureus or S. thermophilus, second complementarity domain, or a second complementarity domain described herein, e.g., from FIGS. 1A-1G.

[0483] The duplexed region formed by first and second complementarity domains is typically 6, 7, 8, 9, 10, 11, 12, 13, 14, 15, 16, 17, 18, 19, 20, 21 or 22 base pairs in length (excluding any looped out or unpaired nucleotides).

[0484] In some embodiments, the first and second complementarity domains, when duplexed, comprise 11 paired nucleotides, for example in the gRNA sequence (one paired strand underlined, one bolded):

(SEQ ID NO: 5)

NNNNNNNNNNNNNNNNNNNNGUUUUAGAGCUAGAAAUAGCAAGUUAAAA
UAAGGCUAGUCCGUUAUCAACUUGAAAAAGUGGCACCGAGUCGGUGC.

[0485] In some embodiments the first and second complementarity domains, when duplexed, comprise 15 paired nucleotides, for example in the gRNA sequence (one paired strand underlined, one bolded):

(SEQ ID NO: 27)

NNNNNNNNNNNNNNNNNNNNGUUUUAGAGCUAUGCUGAAAAGCAUAGCA
AGUUAAAAUAAGGCUAGUCCGUUAUCAACUUGAAAAAGUGGCACCGAGU
CGGUGC.

[0486] In some embodiments the first and second complementarity domains, when duplexed, comprise 16 paired nucleotides, for example in the gRNA sequence (one paired strand underlined, one bolded):

(SEQ ID NO: 28)

NNNNNNNNNNNNNNNNNNNNGUUUUAGAGCUAUGCUGGAAACAGCAUAG
CAAGUUAAAAUAAGGCUAGUCCGUUAUCAACUUGAAAAAGUGGCACCGA
GUCGGUGC.

[0487] In some embodiments the first and second complementarity domains, when duplexed, comprise 21 paired nucleotides, for example in the gRNA sequence (one paired strand underlined, one bolded):

(SEQ ID NO: 29)

NNNNNNNNNNNNNNNNNNNNGUUUUAGAGCUAUGCUGUUUUGGAAACAA
AACAGCAUAGCAAGUUAAAAUAAGGCUAGUCCGUUAUCAACUUGAAAAA
GUGGCACCGAGUCGGUGC.

[0488] In some embodiments, nucleotides are exchanged to remove poly-U tracts, for example in the gRNA sequences (exchanged nucleotides underlined):

(SEQ ID NO: 30)

NNNNNNNNNNNNNNNNNNNNGUAUUAGAGCUAGAAAUAGCAAGUUAAUA
UAAGGCUAGUCCGUUAUCAACUUGAAAAAGUGGCACCGAGUCGGUGC.;

(SEQ ID NO: 31)

NNNNNNNNNNNNNNNNNNNNGUUUAAGAGCUAGAAAUAGCAAGUUUAAA
UAAGGCUAGUCCGUUAUCAACUUGAAAAAGUGGCACCGAGUCGGUGC.;
or

(SEQ ID NO: 32)

NNNNNNNNNNNNNNNNNNNNGUAUUAGAGCUAUGCUGUAUUGGAAACAA
UACAGCAUAGCAAGUUAAUAUAAGGCUAGUCCGUUAUCAACUUGAAAAA
GUGGCACCGAGUCGGUGC..

[0489] The 5′ Extension Domain

[0490] In an embodiment, a modular gRNA can comprise additional sequence, 5′ to the second complementarity domain. In an embodiment, the 5′ extension domain is 2 to 10, 2 to 9, 2 to 8, 2 to 7, 2 to 6, 2 to 5, or 2 to 4 nucleotides in length. In an embodiment, the 5′ extension domain is 2, 3, 4, 5, 6, 7, 8, 9, or 10 or more nucleotides in length.

[0491] In an embodiment, the 5′ extension domain nucleotides do not comprise modifications, e.g., modifications of the type provided in Section VIII. However, in an embodiment, the 5′ extension domain comprises one or more modifications, e.g., modifications that it render it less susceptible to degradation or more bio-compatible, e.g., less immunogenic. By way of example, the backbone of the 5′ extension domain can be modified with a phosphorothioate, or other modification(s) from Section VIII. In an embodiment, a nucleotide of the 5′ extension domain can comprise a 2′ modification, e.g., a 2-acetylation, e.g., a 2′ methylation, or other modification(s) from Section VIII.

[0492] In some embodiments, the 5′ extension domain can comprise as many as 1, 2, 3, 4, 5, 6, 7 or 8 modifications. In an embodiment the 5′ extension domain comprises as many as 1, 2, 3, or 4 modifications within 5 nucleotides of its 5′ end, e.g., in a modular gRNA molecule. In an embodiment the 5′ extension domain comprises as many as 1, 2, 3, or 4 modifications within 5 nucleotides of its 3′ end, e.g., in a modular gRNA molecule.

[0493] In some embodiments, the 5′ extension domain comprises modifications at two consecutive nucleotides, e.g., two consecutive nucleotides that are within 5 nucleotides of the 5′ end of the 5′ extension domain, within 5 nucleotides of the 3′ end of the 5′ extension domain, or more than 5 nucleotides away from one or both ends of the 5′ extension domain. In an embodiment, no two consecutive nucleotides are modified within 5 nucleotides of the 5′ end of the 5′ extension domain, within 5 nucleotides of the 3′ end of the 5′ extension domain, or within a region that is more than 5 nucleotides away from one or both ends of the 5′ extension domain. In an embodiment, no nucleotide is modified within 5 nucleotides of the 5′ end of the 5′ extension domain, within 5 nucleotides of the 3′ end of the 5′ extension domain, or within a region that is more than 5 nucleotides away from one or both ends of the 5′ extension domain.

[0494] Modifications in the 5′ extension domain can be selected so as to not interfere with gRNA molecule efficacy, which can be evaluated by testing a candidate modification in the system described in Section IV. gRNAs having a candidate 5′ extension domain having a selected length, sequence, degree of complementarity, or degree of modification, can be evaluated in the system described at Section IV. The candidate 5′ extension domain can be placed, either alone, or with one or more other candidate changes in a gRNA molecule/Cas9 molecule system known to be functional with a selected target and evaluated.

[0495] In an embodiment, the 5′ extension domain has at least 60, 70, 80, 85, 90 or 95% homology with, or differs by no more than 1, 2, 3, 4, 5 or 6 nucleotides from, a reference 5′ extention domain, e.g., a naturally occurring, e.g., an S. pyogenes, S. aureus or S. thermophilus, 5′ extention domain, or a 5′ extension domain described herein, e.g., from FIGS. 1A-1G.

[0496] The Linking Domain

[0497] In a unimolecular gRNA molecule, the linking domain is disposed between the first and second complementarity domains. In a modular gRNA molecule, the two molecules are associated with one another by the complementarity domains.

[0498] In an embodiment, the linking domain is 10+/−5, 20+/−5, 30+/−5, 40+/−5, 50+/−5, 60+/−5, 70+/−5, 80+/−5, 90+/−5, or 100+/−5 nucleotides, in length.

[0499] In an embodiment, the linking domain is 20+/−10, 30+/−10, 40+/−10, 50+/−10, 60+/−10, 70+/−10, 80+/−10, 90+/−10, or 100+/−10 nucleotides in length.

[0500] In an embodiment, the linking domain is 10 to 100, 10 to 90, 10 to 80, 10 to 70, 10 to 60, 10 to 50, 10 to 40, 10 to 30, 10 to 20 or 10 to 15 nucleotides in length. In other embodiments, the linking domain is 20 to 100, 20 to 90, 20 to 80, 20 to 70, 20 to 60, 20 to 50, 20 to 40, 20 to 30, or 20 to 25 nucleotides in length.

[0501] In an embodiment, the linking domain is 1, 2, 3, 4, 5, 6, 7, 8, 9, 10, 11, 12, 13, 14, 15, 16 17, 18, 19, or 20 nucleotides in length.

[0502] In and embodiment, the linking domain is a covalent bond.

[0503] In an embodiment, the linking domain comprises a duplexed region, typically adjacent to or within 1, 2, or 3 nucleotides of the 3′ end of the first complementarity domain and/or the 5-end of the second complementarity domain. In an embodiment, the duplexed region can be 20+/−10 base pairs in length. In an embodiment, the duplexed region can be 10+/−5, 15+/−5, 20+/−5, or 30+/−5 base pairs in length. In an embodiment, the duplexed region can be 1, 2, 3, 4, 5, 6, 7, 8, 9, 10, 11, 12, 13, 14, or 15 base pairs in length.

[0504] Typically the sequences forming the duplexed region have exact complementarity with one another, though in some embodiments as many as 1, 2, 3, 4, 5, 6, 7 or 8 nucleotides are not complementary with the corresponding nucleotides.

[0505] In an embodiment, the linking domain nucleotides do not comprise modifications, e.g., modifications of the type provided in Section VIII. However, in an embodiment, the linking domain comprises one or more modifications, e.g., modifications that it render it less susceptible to degradation or more bio-compatible, e.g., less immunogenic. By way of example, the backbone of the linking domain can be modified with a phosphorothioate, or other modification(s) from Section VIII. In an embodiment, a nucleotide of the linking domain can comprise a 2′ modification, e.g., a 2-acetylation, e.g., a 2′ methylation, or other modification(s) from Section VIII.

[0506] In some embodiments, the linking domain can comprise as many as 1, 2, 3, 4, 5, 6, 7 or 8 modifications.

[0507] Modifications in a linking domain can be selected so as to not interfere with targeting efficacy, which can be evaluated by testing a candidate modification in the system described in Section IV. gRNAs having a candidate linking domain having a selected length, sequence, degree of complementarity, or degree of modification, can be evaluated a system described in Section IV. A candidate linking domain can be placed, either alone, or with one or more other candidate changes in a gRNA molecule/Cas9 molecule system known to be functional with a selected target and evaluated.

[0508] In an embodiment, the linking domain has at least 60, 70, 80, 85, 90 or 95% homology with, or differs by no more than 1, 2, 3, 4, 5 or 6 nucleotides from, a reference linking domain, e.g., a linking domain described herein, e.g., from FIGS. 1A-1G.

[0509] The Proximal Domain

[0510] In an embodiment, the proximal domain is 6+/−2, 7+/−2, 8+/−2, 9+/−2, 10+/−2, 11+/−2, 12+/−2, 13+/−2, 14+/−2, 14+/−2, 16+/−2, 17+/−2, 18+/−2, 19+/−2, or 20+/−2 nucleotides in length.

[0511] In an embodiment, the proximal domain is 6, 7, 8, 9, 10, 11, 12, 13, 14, 14, 16, 17, 18, 19, 20, 21, 22, 23, 24, 25 or 26 nucleotides in length.

[0512] In an embodiment, the proximal domain is 5 to 20, 7, to 18, 9 to 16, or 10 to 14 nucleotides in length.

[0513] In an embodiment, the proximal domain nucleotides do not comprise modifications, e.g., modifications of the type provided in Section VIII. However, in an embodiment, the proximal domain comprises one or more modifications, e.g., modifications that it render it less susceptible to degradation or more bio-compatible, e.g., less immunogenic. By way of example, the backbone of the proximal domain can be modified with a phosphorothioate, or other modification(s) from Section VIII. In an embodiment, a nucleotide of the proximal domain can comprise a 2′ modification, e.g., a 2-acetylation, e.g., a 2′ methylation, or other modification(s) from Section VIII.

[0514] In some embodiments, the proximal domain can comprise as many as 1, 2, 3, 4, 5, 6, 7 or 8 modifications. In an embodiment, the proximal domain comprises as many as 1, 2, 3, or 4 modifications within 5 nucleotides of its 5′ end, e.g., in a modular gRNA molecule. In an embodiment, the target domain comprises as many as 1, 2, 3, or 4 modifications within 5 nucleotides of its 3′ end, e.g., in a modular gRNA molecule.

[0515] In some embodiments, the proximal domain comprises modifications at two consecutive nucleotides, e.g., two consecutive nucleotides that are within 5 nucleotides of the 5′ end of the proximal domain, within 5 nucleotides of the 3′ end of the proximal domain, or more than 5 nucleotides away from one or both ends of the proximal domain. In an embodiment, no two consecutive nucleotides are modified within 5 nucleotides of the 5′ end of the proximal domain, within 5 nucleotides of the 3′ end of the proximal domain, or within a region that is more than 5 nucleotides away from one or both ends of the proximal domain. In an embodiment, no nucleotide is modified within 5 nucleotides of the 5′ end of the proximal domain, within 5 nucleotides of the 3′ end of the proximal domain, or within a region that is more than 5 nucleotides away from one or both ends of the proximal domain.

[0516] Modifications in the proximal domain can be selected so as to not interfere with gRNA molecule efficacy, which can be evaluated by testing a candidate modification in the system described in Section IV. gRNAs having a candidate proximal domain having a selected length, sequence, degree of complementarity, or degree of modification, can be evaluated in the system described at Section IV. The candidate proximal domain can be placed, either alone, or with one or more other candidate changes in a gRNA molecule/Cas9 molecule system known to be functional with a selected target and evaluated.

[0517] In an embodiment, the proximal domain has at least 60, 70, 80, 85 90 or 95% homology with, or differs by no more than 1, 2, 3, 4, 5, or 6 nucleotides from, a reference proximal domain, e.g., a naturally occurring, e.g., an S. pyogenes, S. aureus or S. thermophilus, proximal domain, or a proximal domain described herein, e.g., from FIGS. 1A-1G.

[0518] The Tail Domain

[0519] In an embodiment, the tail domain is 10+/−5, 20+/−5, 30+/−5, 40+/−5, 50+/−5, 60+/−5, 70+/−5, 80+/−5, 90+/−5, or 100+/−5 nucleotides in length.

[0520] In an embodiment, the tail domain is 20+/−5 nucleotides in length.

[0521] In an embodiment, the tail domain is 20+/−10, 30+/−10, 40+/−10, 50+/−10, 60+/−10, 70+/−10, 80+/−10, 90+/−10, or 100+/−10 nucleotides, in length.

[0522] In an embodiment, the tail domain is 25+/−10 nucleotides in length.

[0523] In an embodiment, the tail domain is 10 to 100, 10 to 90, 10 to 80, 10 to 70, 10 to 60, 10 to 50, 10 to 40, 10 to 30, 10 to 20 or 10 to 15 nucleotides in length.

[0524] In other embodiments, the tail domain is 20 to 100, 20 to 90, 20 to 80, 20 to 70, 20 to 60, 20 to 50, 20 to 40, 20 to 30, or 20 to 25 nucleotides in length.

[0525] In an embodiment, the tail domain is 1 to 20, 1 to 1, 1 to 10, or 1 to 5 nucleotides in length.

[0526] In an embodiment, the tail domain nucleotides do not comprise modifications, e.g., modifications of the type provided in Section VIII. However, in an embodiment, the tail domain comprises one or more modifications, e.g., modifications that it render it less susceptible to degradation or more bio-compatible, e.g., less immunogenic. By way of example, the backbone of the tail domain can be modified with a phosphorothioate, or other modification(s) from Section VIII. In an embodiment, a nucleotide of the tail domain can comprise a 2′ modification, e.g., a 2-acetylation, e.g., a 2′ methylation, or other modification(s) from Section VIII.

[0527] In some embodiments, the tail domain can have as many as 1, 2, 3, 4, 5, 6, 7 or 8 modifications. In an embodiment, the target domain comprises as many as 1, 2, 3, or 4 modifications within 5 nucleotides of its 5′ end. In an embodiment, the target domain comprises as many as 1, 2, 3, or 4 modifications within 5 nucleotides of its 3′ end.

[0528] In an embodiment, the tail domain comprises a tail duplex domain, which can form a tail duplexed region. In an embodiment, the tail duplexed region can be 3, 4, 5, 6, 7, 8, 9, 10, 11, or 12 base pairs in length. In an embodiment, a further single stranded domain, exists 3′ to the tail duplexed domain. In an embodiment, this domain is 3, 4, 5, 6, 7, 8, 9, or 10 nucleotides in length. In an embodiment, it is 4 to 6 nucleotides in length.

[0529] In an embodiment, the tail domain has at least 60, 70, 80, 90 or 95% homology with, or differs by no more than 1, 2, 3, 4, 5 or 6 nucleotides from, a reference tail domain, e.g., a naturally occurring, e.g., an S. pyogenes, S. aureus or S. thermophilus, tail domain, or a tail domain described herein, e.g., from FIGS. 1A-1G.

[0530] In an embodiment, the proximal and tail domain, taken together comprise the following sequences:

(SEQ ID NO: 33)

AAGGCUAGUCCGUUAUCAACUUGAAAAAGUGGCACCGAGUCGGUGCU,
or

(SEQ ID NO: 34)

AAGGCUAGUCCGUUAUCAACUUGAAAAAGUGGCACCGAGUCGGUGGUGC,
or

(SEQ ID NO: 35)

AAGGCUAGUCCGUUAUCAACUUGAAAAAGUGGCACCGAGUCGGUGCGGA
UC,
or

(SEQ ID NO: 36)

AAGGCUAGUCCGUUAUCAACUUGAAAAAGUG,
or

(SEQ ID NO: 37)

AAGGCUAGUCCGUUAUCA,
or

(SEQ ID NO: 38)

AAGGCUAGUCCG.

[0531] In an embodiment, the tail domain comprises the 3′ sequence UUUUUU, e.g., if a U6 promoter is used for transcription.

[0532] In an embodiment, the tail domain comprises the 3′ sequence UUUU, e.g., if an H1 promoter is used for transcription.

[0533] In an embodiment, tail domain comprises variable numbers of 3′ Us depending, e.g., on the termination signal of the pol-III promoter used.

[0534] In an embodiment, the tail domain comprises variable 3′ sequence derived from the DNA template if a T7 promoter is used.

[0535] In an embodiment, the tail domain comprises variable 3′ sequence derived from the DNA template, e.g., if in vitro transcription is used to generate the RNA molecule.

[0536] In an embodiment, the tail domain comprises variable 3′ sequence derived from the DNA template, e., if a pol-II promoter is used to drive transcription.

[0537] Modifications in the tail domain can be selected so as to not interfere with targeting efficacy, which can be evaluated by testing a candidate modification in the system described in Section IV. gRNAs having a candidate tail domain having a selected length, sequence, degree of complementarity, or degree of modification, can be evaluated in the system described in Section IV. The candidate tail domain can be placed, either alone, or with one or more other candidate changes in a gRNA molecule/Cas9 molecule system known to be functional with a selected target and evaluated.

[0538] In some embodiments, the tail domain comprises modifications at two consecutive nucleotides, e.g., two consecutive nucleotides that are within 5 nucleotides of the 5′ end of the tail domain, within 5 nucleotides of the 3′ end of the tail domain, or more than 5 nucleotides away from one or both ends of the tail domain. In an embodiment, no two consecutive nucleotides are modified within 5 nucleotides of the 5′ end of the tail domain, within 5 nucleotides of the 3′ end of the tail domain, or within a region that is more than 5 nucleotides away from one or both ends of the tail domain. In an embodiment, no nucleotide is modified within 5 nucleotides of the 5′ end of the tail domain, within 5 nucleotides of the 3′ end of the tail domain, or within a region that is more than 5 nucleotides away from one or both ends of the tail domain.

[0539] In an embodiment, a gRNA has the following structure:

[0540] 5′ [targeting domain]-[first complementarity domain]-[linking domain]-[second complementarity domain]-[proximal domain]-[tail domain]-3′,

[0541] wherein the targeting domain comprises a core domain and, optionally, a secondary domain, and is 10 to 50 nucleotides in length;

[0542] the first complementarity domain is 5 to 25 nucleotides in length and, in an embodiment, has at least 50, 60, 70, 80, 85, 90 or 95% homology with a reference first complementarity domain disclosed herein;

[0543] the linking domain is 1 to 5 nucleotides in length;

[0544] the second complementarity domain is 5 to 27 nucleotides in length and, in an embodiment has at least 50, 60, 70, 80, 85, 90 or 95% homology with a reference second complementarity domain disclosed herein;

[0545] the proximal domain is 5 to 20 nucleotides in length and, in an embodiment has at least 50, 60, 70, 80, 85, 90 or 95% homology with a reference proximal domain disclosed herein;

[0546] and the tail domain is absent or a nucleotide sequence is 1 to 50 nucleotides in length and, in an embodiment, has at least 50, 60, 70, 80, 85, 90 or 95% homology with a reference tail domain disclosed herein.

[0547] Exemplary Chimeric gRNAs

[0548] In an embodiment, a unimolecular, or chimeric, gRNA comprises, preferably from 5′ to 3′:
[0549] a targeting domain (which is complementary to a target nucleic acid);
[0550] a first complementarity domain, e.g., comprising 15, 16, 17, 18, 19, 20, 21, 22, 23, 24, 25, or 26 nucleotides;
[0551] a linking domain;
[0552] a second complementarity domain (which is complementary to the first complementarity domain);
[0553] a proximal domain; and
[0554] a tail domain,
[0555] wherein,
[0556] (a) the proximal and tail domain, when taken together, comprise at least 15, 18, 20, 25, 30, 31, 35, 40, 45, 49, 50, or 53 nucleotides;
[0557] (b) there are at least 15, 18, 20, 25, 30, 31, 35, 40, 45, 49, 50, or 53 nucleotides 3′ to the last nucleotide of the second complementarity domain; or
[0558] (c) there are at least 16, 19, 21, 26, 31, 32, 36, 41, 46, 50, 51, or 54 nucleotides 3′ to the last nucleotide of the second complementarity domain that is complementary to its corresponding nucleotide of the first complementarity domain.

[0559] In an embodiment, the sequence from (a), (b), or (c), has at least 60, 75, 80, 85, 90, 95, or 99% homology with the corresponding sequence of a naturally occurring gRNA, or with a gRNA described herein.

[0560] In an embodiment, the proximal and tail domain, when taken together, comprise at least 15, 18, 20, 25, 30, 31, 35, 40, 45, 49, 50, or 53 nucleotides.

[0561] In an embodiment, there are at least 15, 18, 20, 25, 30, 31, 35, 40, 45, 49, 50, or 53 nucleotides 3′ to the last nucleotide of the second complementarity domain.

[0562] In an embodiment, there are at least 16, 19, 21, 26, 31, 32, 36, 41, 46, 50, 51, or 54 nucleotides 3′ to the last nucleotide of the second complementarity domain that is complementary to its corresponding nucleotide of the first complementarity domain.

[0563] In an embodiment, the targeting domain comprises, has, or consists of, 16, 17, 18, 19, 20, 21, 22, 23, 24, 25 or 26 nucleotides (e.g., 16, 17, 18, 19, 20, 21, 22, 23, 24, 25 or 26 consecutive nucleotides) having complementarity with the target domain, e.g., the targeting domain is 16, 17, 18, 19, 20, 21, 22, 23, 24, 25 or 26 nucleotides in length.

[0564] In an embodiment, the targeting domain comprises, has, or consists of, 16 nucleotides (e.g., 16 consecutive nucleotides) having complementarity with the target domain, e.g., the targeting domain is 16 nucleotides in length.

[0565] In an embodiment, the targeting domain comprises, has, or consists of, 17 nucleotides (e.g., 17 consecutive nucleotides) having complementarity with the target domain, e.g., the targeting domain is 17 nucleotides in length.

[0566] In an embodiment, the targeting domain comprises, has, or consists of, 18 nucleotides (e.g., 18 consecutive nucleotides) having complementarity with the target domain, e.g., the targeting domain is 18 nucleotides in length.

[0567] In an embodiment, the targeting domain comprises, has, or consists of, 19 nucleotides (e.g., 19 consecutive nucleotides) having complementarity with the target domain, e.g., the targeting domain is 19 nucleotides in length.

[0568] In an embodiment, the targeting domain comprises, has, or consists of, 20 nucleotides (e.g., 20 consecutive nucleotides) having complementarity with the target domain, e.g., the targeting domain is 20 nucleotides in length.

[0569] In an embodiment, the targeting domain comprises, has, or consists of, 21 nucleotides (e.g., 21 consecutive nucleotides) having complementarity with the target domain, e.g., the targeting domain is 21 nucleotides in length.

[0570] In an embodiment, the targeting domain comprises, has, or consists of, 22 nucleotides (e.g., 22 consecutive nucleotides) having complementarity with the target domain, e.g., the targeting domain is 22 nucleotides in length.

[0571] In an embodiment, the targeting domain comprises, has, or consists of, 23 nucleotides (e.g., 23 consecutive nucleotides) having complementarity with the target domain, e.g., the targeting domain is 23 nucleotides in length.

[0572] In an embodiment, the targeting domain comprises, has, or consists of, 24 nucleotides (e.g., 24 consecutive nucleotides) having complementarity with the target domain, e.g., the targeting domain is 24 nucleotides in length.

[0573] In an embodiment, the targeting domain comprises, has, or consists of, 25 nucleotides (e.g., 25 consecutive nucleotides) having complementarity with the target domain, e.g., the targeting domain is 25 nucleotides in length.

[0574] In an embodiment, the targeting domain comprises, has, or consists of, 26 nucleotides (e.g., 26 consecutive nucleotides) having complementarity with the target domain, e.g., the targeting domain is 26 nucleotides in length.

[0575] In an embodiment, the targeting domain comprises, has, or consists of, 16 nucleotides (e.g., 16 consecutive nucleotides) having complementarity with the target domain, e.g., the targeting domain is 16 nucleotides in length; and the proximal and tail domain, when taken together, comprise at least 15, 18, 20, 25, 30, 31, 35, 40, 45, 49, 50, or 53 nucleotides.

[0576] In an embodiment, the targeting domain comprises, has, or consists of, 16 nucleotides (e.g., 16 consecutive nucleotides) having complementarity with the target domain, e.g., the targeting domain is 16 nucleotides in length; and there are at least 15, 18, 20, 25, 30, 31, 35, 40, 45, 49, 50, or 53 nucleotides 3′ to the last nucleotide of the second complementarity domain.

[0577] In an embodiment, the targeting domain comprises, has, or consists of, 16 nucleotides (e.g., 16 consecutive nucleotides) having complementarity with the target domain, e.g., the targeting domain is 16 nucleotides in length; and there are at least 16, 19, 21, 26, 31, 32, 36, 41, 46, 50, 51, or 54 nucleotides 3′ to the last nucleotide of the second complementarity domain that is complementary to its corresponding nucleotide of the first complementarity domain.

[0578] In an embodiment, the targeting domain comprises, has, or consists of, 17 nucleotides (e.g., 17 consecutive nucleotides) having complementarity with the target domain, e.g., the targeting domain is 17 nucleotides in length; and the proximal and tail domain, when taken together, comprise at least 15, 18, 20, 25, 30, 31, 35, 40, 45, 49, 50, or 53 nucleotides.

[0579] In an embodiment, the targeting domain comprises, has, or consists of, 17 nucleotides (e.g., 17 consecutive nucleotides) having complementarity with the target domain, e.g., the targeting domain is 17 nucleotides in length; and there are at least 15, 18, 20, 25, 30, 31, 35, 40, 45, 49, 50, or 53 nucleotides 3′ to the last nucleotide of the second complementarity domain.

[0580] In an embodiment, the targeting domain comprises, has, or consists of, 17 nucleotides (e.g., 17 consecutive nucleotides) having complementarity with the target domain, e.g., the targeting domain is 17 nucleotides in length; and there are at least 16, 19, 21, 26, 31, 32, 36, 41, 46, 50, 51, or 54 nucleotides 3′ to the last nucleotide of the second complementarity domain that is complementary to its corresponding nucleotide of the first complementarity domain.

[0581] In an embodiment, the targeting domain comprises, has, or consists of, 18 nucleotides (e.g., 18 consecutive nucleotides) having complementarity with the target domain, e.g., the targeting domain is 18 nucleotides in length; and the proximal and tail domain, when taken together, comprise at least 15, 18, 20, 25, 30, 31, 35, 40, 45, 49, 50, or 53 nucleotides.

[0582] In an embodiment, the targeting domain comprises, has, or consists of, 18 nucleotides (e.g., 18 consecutive nucleotides) having complementarity with the target domain, e.g., the targeting domain is 18 nucleotides in length; and there are at least 15, 18, 20, 25, 30, 31, 35, 40, 45, 49, 50, or 53 nucleotides 3′ to the last nucleotide of the second complementarity domain.

[0583] In an embodiment, the targeting domain comprises, has, or consists of, 18 nucleotides (e.g., 18 consecutive nucleotides) having complementarity with the target domain, e.g., the targeting domain is 18 nucleotides in length; and there are at least 16, 19, 21, 26, 31, 32, 36, 41, 46, 50, 51, or 54 nucleotides 3′ to the last nucleotide of the second complementarity domain that is complementary to its corresponding nucleotide of the first complementarity domain.

[0584] In an embodiment, the targeting domain comprises, has, or consists of, 19 nucleotides (e.g., 19 consecutive nucleotides) having complementarity with the target domain, e.g., the targeting domain is 19 nucleotides in length; and the proximal and tail domain, when taken together, comprise at least 15, 18, 20, 25, 30, 31, 35, 40, 45, 49, 50, or 53 nucleotides.

[0585] In an embodiment, the targeting domain comprises, has, or consists of, 19 nucleotides (e.g., 19 consecutive nucleotides) having complementarity with the target domain, e.g., the targeting domain is 19 nucleotides in length; and there are at least 15, 18, 20, 25, 30, 31, 35, 40, 45, 49, 50, or 53 nucleotides 3′ to the last nucleotide of the second complementarity domain.

[0586] In an embodiment, the targeting domain comprises, has, or consists of, 19 nucleotides (e.g., 19 consecutive nucleotides) having complementarity with the target domain, e.g., the targeting domain is 19 nucleotides in length; and there are at least 16, 19, 21, 26, 31, 32, 36, 41, 46, 50, 51, or 54 nucleotides 3′ to the last nucleotide of the second complementarity domain that is complementary to its corresponding nucleotide of the first complementarity domain.

[0587] In an embodiment, the targeting domain comprises, has, or consists of, 20 nucleotides (e.g., 20 consecutive nucleotides) having complementarity with the target domain, e.g., the targeting domain is 20 nucleotides in length; and the proximal and tail domain, when taken together, comprise at least 15, 18, 20, 25, 30, 31, 35, 40, 45, 49, 50, or 53 nucleotides.

[0588] In an embodiment, the targeting domain comprises, has, or consists of, 20 nucleotides (e.g., 20 consecutive nucleotides) having complementarity with the target domain, e.g., the targeting domain is 20 nucleotides in length; and there are at least 15, 18, 20, 25, 30, 31, 35, 40, 45, 49, 50, or 53 nucleotides 3′ to the last nucleotide of the second complementarity domain.

[0589] In an embodiment, the targeting domain comprises, has, or consists of, 20 nucleotides (e.g., 20 consecutive nucleotides) having complementarity with the target domain, e.g., the targeting domain is 20 nucleotides in length; and there are at least 16, 19, 21, 26, 31, 32, 36, 41, 46, 50, 51, or 54 nucleotides 3′ to the last nucleotide of the second complementarity domain that is complementary to its corresponding nucleotide of the first complementarity domain.

[0590] In an embodiment, the targeting domain comprises, has, or consists of, 21 nucleotides (e.g., 21 consecutive nucleotides) having complementarity with the target domain, e.g., the targeting domain is 21 nucleotides in length; and the proximal and tail domain, when taken together, comprise at least 15, 18, 20, 25, 30, 31, 35, 40, 45, 49, 50, or 53 nucleotides.

[0591] In an embodiment, the targeting domain comprises, has, or consists of, 21 nucleotides (e.g., 21 consecutive nucleotides) having complementarity with the target domain, e.g., the targeting domain is 21 nucleotides in length; and there are at least 15, 18, 20, 25, 30, 31, 35, 40, 45, 49, 50, or 53 nucleotides 3′ to the last nucleotide of the second complementarity domain.

[0592] In an embodiment, the targeting domain comprises, has, or consists of, 21 nucleotides (e.g., 21 consecutive nucleotides) having complementarity with the target domain, e.g., the targeting domain is 21 nucleotides in length; and there are at least 16, 19, 21, 26, 31, 32, 36, 41, 46, 50, 51, or 54 nucleotides 3′ to the last nucleotide of the second complementarity domain that is complementary to its corresponding nucleotide of the first complementarity domain.

[0593] In an embodiment, the targeting domain comprises, has, or consists of, 22 nucleotides (e.g., 22 consecutive nucleotides) having complementarity with the target domain, e.g., the targeting domain is 22 nucleotides in length; and the proximal and tail domain, when taken together, comprise at least 15, 18, 20, 25, 30, 31, 35, 40, 45, 49, 50, or 53 nucleotides.

[0594] In an embodiment, the targeting domain comprises, has, or consists of, 22 nucleotides (e.g., 22 consecutive nucleotides) having complementarity with the target domain, e.g., the targeting domain is 22 nucleotides in length; and there are at least 15, 18, 20, 25, 30, 31, 35, 40, 45, 49, 50, or 53 nucleotides 3′ to the last nucleotide of the second complementarity domain.

[0595] In an embodiment, the targeting domain comprises, has, or consists of, 22 nucleotides (e.g., 22 consecutive nucleotides) having complementarity with the target domain, e.g., the targeting domain is 22 nucleotides in length; and there are at least 16, 19, 21, 26, 31, 32, 36, 41, 46, 50, 51, or 54 nucleotides 3′ to the last nucleotide of the second complementarity domain that is complementary to its corresponding nucleotide of the first complementarity domain.

[0596] In an embodiment, the targeting domain comprises, has, or consists of, 23 nucleotides (e.g., 23 consecutive nucleotides) having complementarity with the target domain, e.g., the targeting domain is 23 nucleotides in length; and the proximal and tail domain, when taken together, comprise at least 15, 18, 20, 25, 30, 31, 35, 40, 45, 49, 50, or 53 nucleotides.

[0597] In an embodiment, the targeting domain comprises, has, or consists of, 23 nucleotides (e.g., 23 consecutive nucleotides) having complementarity with the target domain, e.g., the targeting domain is 23 nucleotides in length; and there are at least 15, 18, 20, 25, 30, 31, 35, 40, 45, 49, 50, or 53 nucleotides 3′ to the last nucleotide of the second complementarity domain.

[0598] In an embodiment, the targeting domain comprises, has, or consists of, 23 nucleotides (e.g., 23 consecutive nucleotides) having complementarity with the target domain, e.g., the targeting domain is 23 nucleotides in length; and there are at least 16, 19, 21, 26, 31, 32, 36, 41, 46, 50, 51, or 54 nucleotides 3′ to the last nucleotide of the second complementarity domain that is complementary to its corresponding nucleotide of the first complementarity domain.

[0599] In an embodiment, the targeting domain comprises, has, or consists of, 24 nucleotides (e.g., 24 consecutive nucleotides) having complementarity with the target domain, e.g., the targeting domain is 24 nucleotides in length; and the proximal and tail domain, when taken together, comprise at least 15, 18, 20, 25, 30, 31, 35, 40, 45, 49, 50, or 53 nucleotides.

[0600] In an embodiment, the targeting domain comprises, has, or consists of, 24 nucleotides (e.g., 24 consecutive nucleotides) having complementarity with the target domain, e.g., the targeting domain is 24 nucleotides in length; and there are at least 15, 18, 20, 25, 30, 31, 35, 40, 45, 49, 50, or 53 nucleotides 3′ to the last nucleotide of the second complementarity domain.

[0601] In an embodiment, the targeting domain comprises, has, or consists of, 24 nucleotides (e.g., 24 consecutive nucleotides) having complementarity with the target domain, e.g., the targeting domain is 24 nucleotides in length; and there are at least 16, 19, 21, 26, 31, 32, 36, 41, 46, 50, 51, or 54 nucleotides 3′ to the last nucleotide of the second complementarity domain that is complementary to its corresponding nucleotide of the first complementarity domain.

[0602] In an embodiment, the targeting domain comprises, has, or consists of, 25 nucleotides (e.g., 25 consecutive nucleotides) having complementarity with the target domain, e.g., the targeting domain is 25 nucleotides in length; and the proximal and tail domain, when taken together, comprise at least 15, 18, 20, 25, 30, 31, 35, 40, 45, 49, 50, or 53 nucleotides.

[0603] In an embodiment, the targeting domain comprises, has, or consists of, 25 nucleotides (e.g., 25 consecutive nucleotides) having complementarity with the target domain, e.g., the targeting domain is 25 nucleotides in length; and there are at least 15, 18, 20, 25, 30, 31, 35, 40, 45, 49, 50, or 53 nucleotides 3′ to the last nucleotide of the second complementarity domain.

[0604] In an embodiment, the targeting domain comprises, has, or consists of, 25 nucleotides (e.g., 25 consecutive nucleotides) having complementarity with the target domain, e.g., the targeting domain is 25 nucleotides in length; and there are at least 16, 19, 21, 26, 31, 32, 36, 41, 46, 50, 51, or 54 nucleotides 3′ to the last nucleotide of the second complementarity domain that is complementary to its corresponding nucleotide of the first complementarity domain.

[0605] In an embodiment, the targeting domain comprises, has, or consists of, 26 nucleotides (e.g., 26 consecutive nucleotides) having complementarity with the target domain, e.g., the targeting domain is 26 nucleotides in length; and the proximal and tail domain, when taken together, comprise at least 15, 18, 20, 25, 30, 31, 35, 40, 45, 49, 50, or 53 nucleotides.

[0606] In an embodiment, the targeting domain comprises, has, or consists of, 26 nucleotides (e.g., 26 consecutive nucleotides) having complementarity with the target domain, e.g., the targeting domain is 26 nucleotides in length; and there are at least 15, 18, 20, 25, 30, 31, 35, 40, 45, 49, 50, or 53 nucleotides 3′ to the last nucleotide of the second complementarity domain.

[0607] In an embodiment, the targeting domain comprises, has, or consists of, 26 nucleotides (e.g., 26 consecutive nucleotides) having complementarity with the target domain, e.g., the targeting domain is 26 nucleotides in length; and there are at least 16, 19, 21, 26, 31, 32, 36, 41, 46, 50, 51, or 54 nucleotides 3′ to the last nucleotide of the second complementarity domain that is complementary to its corresponding nucleotide of the first complementarity domain.

[0608] In an embodiment, the unimolecular, or chimeric, gRNA molecule (comprising a targeting domain, a first complementary domain, a linking domain, a second complementary domain, a proximal domain and, optionally, a tail domain) comprises the following sequence in which the targeting domain is depicted as 20 Ns but could be any sequence and range in length from 16 to 26 nucleotides and in which the gRNA sequence is followed by 6 Us, which serve as a termination signal for the U6 promoter, but which could be either absent or fewer in number: NNNNNNNNNNNNNNNNNNNNGUUUUAGAGCUAGAAAUAGCAAGUUAAAAUAAGG CUAGUCCGUUAUCAACUUGAAAAAGUGGCACCGAGUCGGUGCUUUUUU. In an embodiment, the unimolecular, or chimeric, gRNA molecule is a S. pyogenes gRNA molecule.

[0609] In some embodiments, the unimolecular, or chimeric, gRNA molecule (comprising a targeting domain, a first complementary domain, a linking domain, a second complementary domain, a proximal domain and, optionally, a tail domain) comprises the following sequence in which the targeting domain is depicted as 20 Ns but could be any sequence and range in length from 16 to 26 nucleotides and in which the gRNA sequence is followed by 6 Us, which serve as a termination signal for the U6 promoter, but which could be either absent or fewer in number: NNNNNNNNNNNNNNNNNNNNGUUUUAGUACUCUGGAAACAGAAUCUACUAAAAC AAGGCAAAAUGCCGUGUUUAUCUCGUCAACUUGUUGGCGAGAUUUUUU. In an embodiment, the unimolecular, or chimeric, gRNA molecule is a S. aureus gRNA molecule.

[0610] Exemplary Modular gRNAs

[0611] In an embodiment, a modular gRNA comprises:
[0612] a first strand comprising, preferably from 5′ to 3′;
   [0613] a targeting domain, e.g., comprising 15, 16, 17, 18, 19, 20, 21, 22, 23, 24, 25, or 26 nucleotides;
   [0614] a first complementarity domain; and
   [0615] a second strand, comprising, preferably from 5′ to 3′;
   [0616] optionally a 5′ extension domain;
   [0617] a second complementarity domain;
   [0618] a proximal domain; and
   [0619] a tail domain,
[0620] wherein:
[0621] (a) the proximal and tail domain, when taken together, comprise at least 15, 18, 20, 25, 30, 31, 35, 40, 45, 49, 50, or 53 nucleotides;
[0622] (b) there are at least 15, 18, 20, 25, 30, 31, 35, 40, 45, 49, 50, or 53 nucleotides 3′ to the last nucleotide of the second complementarity domain; or
[0623] (c) there are at least 16, 19, 21, 26, 31, 32, 36, 41, 46, 50, 51, or 54 nucleotides 3′ to the last nucleotide of the second complementarity domain that is complementary to its corresponding nucleotide of the first complementarity domain.

[0624] In an embodiment, the sequence from (a), (b), or (c), has at least 60, 75, 80, 85, 90, 95, or 99% homology with the corresponding sequence of a naturally occurring gRNA, or with a gRNA described herein.

[0625] In an embodiment, the proximal and tail domain, when taken together, comprise at least 15, 18, 20, 25, 30, 31, 35, 40, 45, 49, 50, or 53 nucleotides.

[0626] In an embodiment, there are at least 15, 18, 20, 25, 30, 31, 35, 40, 45, 49, 50, or 53 nucleotides 3′ to the last nucleotide of the second complementarity domain.

[0627] In an embodiment, there are at least 16, 19, 21, 26, 31, 32, 36, 41, 46, 50, 51, or 54 nucleotides 3′ to the last nucleotide of the second complementarity domain that is complementary to its corresponding nucleotide of the first complementarity domain.

[0628] In an embodiment, the targeting domain comprises, has, or consists of, 16, 17, 18, 19, 20, 21, 22, 23, 24, 25 or 26 nucleotides (e.g., 16, 17, 18, 19, 20, 21, 22, 23, 24, 25 or 26 consecutive nucleotides) having complementarity with the target domain, e.g., the targeting domain is 16, 17, 18, 19, 20, 21, 22, 23, 24, 25 or 26 nucleotides in length.

[0629] In an embodiment, the targeting domain comprises, has, or consists of, 16 nucleotides (e.g., 16 consecutive nucleotides) having complementarity with the target domain, e.g., the targeting domain is 16 nucleotides in length.

[0630] In an embodiment, the targeting domain comprises, has, or consists of, 17 nucleotides (e.g., 17 consecutive nucleotides) having complementarity with the target domain, e.g., the targeting domain is 17 nucleotides in length.

[0631] In an embodiment, the targeting domain comprises, has, or consists of, 18 nucleotides (e.g., 18 consecutive nucleotides) having complementarity with the target domain, e.g., the targeting domain is 18 nucleotides in length.

[0632] In an embodiment, the targeting domain comprises, has, or consists of, 19 nucleotides (e.g., 19 consecutive nucleotides) having complementarity with the target domain, e.g., the targeting domain is 19 nucleotides in length.

[0633] In an embodiment, the targeting domain comprises, has, or consists of, 20 nucleotides (e.g., 20 consecutive nucleotides) having complementarity with the target domain, e.g., the targeting domain is 20 nucleotides in length.

[0634] In an embodiment, the targeting domain comprises, has, or consists of, 21 nucleotides (e.g., 21 consecutive nucleotides) having complementarity with the target domain, e.g., the targeting domain is 21 nucleotides in length.

[0635] In an embodiment, the targeting domain comprises, has, or consists of, 22 nucleotides (e.g., 22 consecutive nucleotides) having complementarity with the target domain, e.g., the targeting domain is 22 nucleotides in length.

[0636] In an embodiment, the targeting domain comprises, has, or consists of, 23 nucleotides (e.g., 23 consecutive nucleotides) having complementarity with the target domain, e.g., the targeting domain is 23 nucleotides in length.

[0637] In an embodiment, the targeting domain comprises, has, or consists of, 24 nucleotides (e.g., 24 consecutive nucleotides) having complementarity with the target domain, e.g., the targeting domain is 24 nucleotides in length.

[0638] In an embodiment, the targeting domain comprises, has, or consists of, 25 nucleotides (e.g., 25 consecutive nucleotides) having complementarity with the target domain, e.g., the targeting domain is 25 nucleotides in length.

[0639] In an embodiment, the targeting domain comprises, has, or consists of, 26 nucleotides (e.g., 26 consecutive nucleotides) having complementarity with the target domain, e.g., the targeting domain is 26 nucleotides in length.

[0640] In an embodiment, the targeting domain comprises, has, or consists of, 16 nucleotides (e.g., 16 consecutive nucleotides) having complementarity with the target domain, e.g., the targeting domain is 16 nucleotides in length; and the proximal and tail domain, when taken together, comprise at least 15, 18, 20, 25, 30, 31, 35, 40, 45, 49, 50, or 53 nucleotides.

[0641] In an embodiment, the targeting domain comprises, has, or consists of, 16 nucleotides (e.g., 16 consecutive nucleotides) having complementarity with the target domain, e.g., the targeting domain is 16 nucleotides in length; and there are at least 15, 18, 20, 25, 30, 31, 35, 40, 45, 49, 50, or 53 nucleotides 3′ to the last nucleotide of the second complementarity domain.

[0642] In an embodiment, the targeting domain comprises, has, or consists of, 16 nucleotides (e.g., 16 consecutive nucleotides) having complementarity with the target domain, e.g., the targeting domain is 16 nucleotides in length; and there are at least 16, 19, 21, 26, 31, 32, 36, 41, 46, 50, 51, or 54 nucleotides 3′ to the last nucleotide of the second complementarity domain that is complementary to its corresponding nucleotide of the first complementarity domain.

[0643] In an embodiment, the targeting domain comprises, has, or consists of, 17 nucleotides (e.g., 17 consecutive nucleotides) having complementarity with the target domain, e.g., the targeting domain is 17 nucleotides in length; and the proximal and tail domain, when taken together, comprise at least 15, 18, 20, 25, 30, 31, 35, 40, 45, 49, 50, or 53 nucleotides.

[0644] In an embodiment, the targeting domain comprises, has, or consists of, 17 nucleotides (e.g., 17 consecutive nucleotides) having complementarity with the target domain, e.g., the targeting domain is 17 nucleotides in length; and there are at least 15, 18, 20, 25, 30, 31, 35, 40, 45, 49, 50, or 53 nucleotides 3′ to the last nucleotide of the second complementarity domain.

[0645] In an embodiment, the targeting domain comprises, has, or consists of, 17 nucleotides (e.g., 17 consecutive nucleotides) having complementarity with the target domain, e.g., the targeting domain is 17 nucleotides in length; and there are at least 16, 19, 21, 26, 31, 32, 36, 41, 46, 50, 51, or 54 nucleotides 3′ to the last nucleotide of the second complementarity domain that is complementary to its corresponding nucleotide of the first complementarity domain.

[0646] In an embodiment, the targeting domain comprises, has, or consists of, 18 nucleotides (e.g., 18 consecutive nucleotides) having complementarity with the target domain, e.g., the targeting domain is 18 nucleotides in length; and the proximal and tail domain, when taken together, comprise at least 15, 18, 20, 25, 30, 31, 35, 40, 45, 49, 50, or 53 nucleotides.

[0647] In an embodiment, the targeting domain comprises, has, or consists of, 18 nucleotides (e.g., 18 consecutive nucleotides) having complementarity with the target domain, e.g., the targeting domain is 18 nucleotides in length; and there are at least 15, 18, 20, 25, 30, 31, 35, 40, 45, 49, 50, or 53 nucleotides 3′ to the last nucleotide of the second complementarity domain.

[0648] In an embodiment, the targeting domain comprises, has, or consists of, 18 nucleotides (e.g., 18 consecutive nucleotides) having complementarity with the target domain, e.g., the targeting domain is 18 nucleotides in length; and there are at least 16, 19, 21, 26, 31, 32, 36, 41, 46, 50, 51, or 54 nucleotides 3′ to the last nucleotide of the second complementarity domain that is complementary to its corresponding nucleotide of the first complementarity domain.

[0649] In an embodiment, the targeting domain comprises, has, or consists of, 19 nucleotides (e.g., 19 consecutive nucleotides) having complementarity with the target domain, e.g., the targeting domain is 19 nucleotides in length; and the proximal and tail domain, when taken together, comprise at least 15, 18, 20, 25, 30, 31, 35, 40, 45, 49, 50, or 53 nucleotides.

[0650] In an embodiment, the targeting domain comprises, has, or consists of, 19 nucleotides (e.g., 19 consecutive nucleotides) having complementarity with the target domain, e.g., the targeting domain is 19 nucleotides in length; and there are at least 15, 18, 20, 25, 30, 31, 35, 40, 45, 49, 50, or 53 nucleotides 3′ to the last nucleotide of the second complementarity domain.

[0651] In an embodiment, the targeting domain comprises, has, or consists of, 19 nucleotides (e.g., 19 consecutive nucleotides) having complementarity with the target domain, e.g., the targeting domain is 19 nucleotides in length; and there are at least 16, 19, 21, 26, 31, 32, 36, 41, 46, 50, 51, or 54 nucleotides 3′ to the last nucleotide of the second complementarity domain that is complementary to its corresponding nucleotide of the first complementarity domain.

[0652] In an embodiment, the targeting domain comprises, has, or consists of, 20 nucleotides (e.g., 20 consecutive nucleotides) having complementarity with the target domain, e.g., the targeting domain is 20 nucleotides in length; and the proximal and tail domain, when taken together, comprise at least 15, 18, 20, 25, 30, 31, 35, 40, 45, 49, 50, or 53 nucleotides.

[0653] In an embodiment, the targeting domain comprises, has, or consists of, 20 nucleotides (e.g., 20 consecutive nucleotides) having complementarity with the target domain, e.g., the targeting domain is 20 nucleotides in length; and there are at least 15, 18, 20, 25, 30, 31, 35, 40, 45, 49, 50, or 53 nucleotides 3′ to the last nucleotide of the second complementarity domain.

[0654] In an embodiment, the targeting domain comprises, has, or consists of, 20 nucleotides (e.g., 20 consecutive nucleotides) having complementarity with the target domain, e.g., the targeting domain is 20 nucleotides in length; and there are at least 16, 19, 21, 26, 31, 32, 36, 41, 46, 50, 51, or 54 nucleotides 3′ to the last nucleotide of the second complementarity domain that is complementary to its corresponding nucleotide of the first complementarity domain.

[0655] In an embodiment, the targeting domain comprises, has, or consists of, 21 nucleotides (e.g., 21 consecutive nucleotides) having complementarity with the target domain, e.g., the targeting domain is 21 nucleotides in length; and the proximal and tail domain, when taken together, comprise at least 15, 18, 20, 25, 30, 31, 35, 40, 45, 49, 50, or 53 nucleotides.

[0656] In an embodiment, the targeting domain comprises, has, or consists of, 21 nucleotides (e.g., 21 consecutive nucleotides) having complementarity with the target domain, e.g., the targeting domain is 21 nucleotides in length; and there are at least 15, 18, 20, 25, 30, 31, 35, 40, 45, 49, 50, or 53 nucleotides 3′ to the last nucleotide of the second complementarity domain.

[0657] In an embodiment, the targeting domain comprises, has, or consists of, 21 nucleotides (e.g., 21 consecutive nucleotides) having complementarity with the target domain, e.g., the targeting domain is 21 nucleotides in length; and there are at least 16, 19, 21, 26, 31, 32, 36, 41, 46, 50, 51, or 54 nucleotides 3′ to the last nucleotide of the second complementarity domain that is complementary to its corresponding nucleotide of the first complementarity domain.

[0658] In an embodiment, the targeting domain comprises, has, or consists of, 22 nucleotides (e.g., 22 consecutive nucleotides) having complementarity with the target domain, e.g., the targeting domain is 22 nucleotides in length; and the proximal and tail domain, when taken together, comprise at least 15, 18, 20, 25, 30, 31, 35, 40, 45, 49, 50, or 53 nucleotides.

[0659] In an embodiment, the targeting domain comprises, has, or consists of, 22 nucleotides (e.g., 22 consecutive nucleotides) having complementarity with the target domain, e.g., the targeting domain is 22 nucleotides in length; and there are at least 15, 18, 20, 25, 30, 31, 35, 40, 45, 49, 50, or 53 nucleotides 3′ to the last nucleotide of the second complementarity domain.

[0660] In an embodiment, the targeting domain comprises, has, or consists of, 22 nucleotides (e.g., 22 consecutive nucleotides) having complementarity with the target domain, e.g., the targeting domain is 22 nucleotides in length; and there are at least 16, 19, 21, 26, 31, 32, 36, 41, 46, 50, 51, or 54 nucleotides 3′ to the last nucleotide of the second complementarity domain that is complementary to its corresponding nucleotide of the first complementarity domain.

[0661] In an embodiment, the targeting domain comprises, has, or consists of, 23 nucleotides (e.g., 23 consecutive nucleotides) having complementarity with the target domain, e.g., the targeting domain is 23 nucleotides in length; and the proximal and tail domain, when taken together, comprise at least 15, 18, 20, 25, 30, 31, 35, 40, 45, 49, 50, or 53 nucleotides.

[0662] In an embodiment, the targeting domain comprises, has, or consists of, 23 nucleotides (e.g., 23 consecutive nucleotides) having complementarity with the target domain, e.g., the targeting domain is 23 nucleotides in length; and there are at least 15, 18, 20, 25, 30, 31, 35, 40, 45, 49, 50, or 53 nucleotides 3′ to the last nucleotide of the second complementarity domain.

[0663] In an embodiment, the targeting domain comprises, has, or consists of, 23 nucleotides (e.g., 23 consecutive nucleotides) having complementarity with the target domain, e.g., the targeting domain is 23 nucleotides in length; and there are at least 16, 19, 21, 26, 31, 32, 36, 41, 46, 50, 51, or 54 nucleotides 3′ to the last nucleotide of the second complementarity domain that is complementary to its corresponding nucleotide of the first complementarity domain.

[0664] In an embodiment, the targeting domain comprises, has, or consists of, 24 nucleotides (e.g., 24 consecutive nucleotides) having complementarity with the target domain, e.g., the targeting domain is 24 nucleotides in length; and the proximal and tail domain, when taken together, comprise at least 15, 18, 20, 25, 30, 31, 35, 40, 45, 49, 50, or 53 nucleotides.

[0665] In an embodiment, the targeting domain comprises, has, or consists of, 24 nucleotides (e.g., 24 consecutive nucleotides) having complementarity with the target domain, e.g., the targeting domain is 24 nucleotides in length; and there are at least 15, 18, 20, 25, 30, 31, 35, 40, 45, 49, 50, or 53 nucleotides 3′ to the last nucleotide of the second complementarity domain.

[0666] In an embodiment, the targeting domain comprises, has, or consists of, 24 nucleotides (e.g., 24 consecutive nucleotides) having complementarity with the target domain, e.g., the targeting domain is 24 nucleotides in length; and there are at least 16, 19, 21, 26, 31, 32, 36, 41, 46, 50, 51, or 54 nucleotides 3′ to the last nucleotide of the second complementarity domain that is complementary to its corresponding nucleotide of the first complementarity domain.

[0667] In an embodiment, the targeting domain comprises, has, or consists of, 25 nucleotides (e.g., 25 consecutive nucleotides) having complementarity with the target domain, e.g., the targeting domain is 25 nucleotides in length; and the proximal and tail domain, when taken together, comprise at least 15, 18, 20, 25, 30, 31, 35, 40, 45, 49, 50, or 53 nucleotides.

[0668] In an embodiment, the targeting domain comprises, has, or consists of, 25 nucleotides (e.g., 25 consecutive nucleotides) having complementarity with the target domain, e.g., the targeting domain is 25 nucleotides in length; and there are at least 15, 18, 20, 25, 30, 31, 35, 40, 45, 49, 50, or 53 nucleotides 3′ to the last nucleotide of the second complementarity domain.

[0669] In an embodiment, the targeting domain comprises, has, or consists of, 25 nucleotides (e.g., 25 consecutive nucleotides) having complementarity with the target domain, e.g., the targeting domain is 25 nucleotides in length; and there are at least 16, 19, 21, 26, 31, 32, 36, 41, 46, 50, 51, or 54 nucleotides 3′ to the last nucleotide of the second complementarity domain that is complementary to its corresponding nucleotide of the first complementarity domain.

[0670] In an embodiment, the targeting domain comprises, has, or consists of, 26 nucleotides (e.g., 26 consecutive nucleotides) having complementarity with the target domain, e.g., the targeting domain is 26 nucleotides in length; and the proximal and tail domain, when taken together, comprise at least 15, 18, 20, 25, 30, 31, 35, 40, 45, 49, 50, or 53 nucleotides.

[0671] In an embodiment, the targeting domain comprises, has, or consists of, 26 nucleotides (e.g., 26 consecutive nucleotides) having complementarity with the target domain, e.g., the targeting domain is 26 nucleotides in length; and there are at least 15, 18, 20, 25, 30, 31, 35, 40, 45, 49, 50, or 53 nucleotides 3′ to the last nucleotide of the second complementarity domain.

[0672] In an embodiment, the targeting domain comprises, has, or consists of, 26 nucleotides (e.g., 26 consecutive nucleotides) having complementarity with the target domain, e.g., the targeting domain is 26 nucleotides in length; and there are at least 16, 19, 21, 26, 31, 32, 36, 41, 46, 50, 51, or 54 nucleotides 3′ to the last nucleotide of the second complementarity domain that is complementary to its corresponding nucleotide of the first complementarity domain.

II. Methods for Designing gRNAs

[0673] Methods for designing gRNAs are described herein, including methods for selecting, designing and validating target domains. Exemplary targeting domains are also provided herein. Targeting Domains discussed herein can be incorporated into the gRNAs described herein.

[0674] Methods for selection and validation of target sequences as well as off-target analyses are described, e.g., in Mali et al., SCIENCE 2013, 339(6121): 823-826; Hsu et al., NAT BIOTECHNOL, published on Jul. 21, 2013; Fu et al., NAT BIOTECHNOL 2014 Jan. 26 (doi: 10.1038/nbt.2808. PubMed PMID: 24463574); Heigwer et al., NAT METHODS 2014, 11(2):122-3 (doi: 10.1038/nmeth.2812. PubMed PMID: 24481216); Bae et al., BIOINFORMATICS, 2014 Jan. 24 (PubMed PMID: 24463181); Xiao A et al., BIOINFORMATICS, 2014 Jan. 21 (PubMed PMID: 243 89662).

[0675] For example, a software tool can be used to optimize the choice of gRNA within a user's target sequence, e.g., to minimize total off-target activity across the genome. Off target activity may be other than cleavage. For each possible gRNA choice, the tool can identify all off-target sequences (preceding either NAG or NGG PAMs) across the genome that contain up to certain number (e.g., 1, 2, 3, 4, 5, 6, 7, 8, 9, or 10) of mismatched base-pairs. The cleavage efficiency at each off-target sequence can be predicted, e.g., using an experimentally-derived weighting scheme. Each possible gRNA is then ranked according to its total predicted off-target cleavage; the top-ranked gRNAs represent those that are likely to have the greatest on-target and the least off-target cleavage. Other functions, e.g., automated reagent design for CRISPR construction, primer design for the on-target Surveyor assay, and primer design for high-throughput detection and quantification of off-target cleavage via next-gen sequencing, can also be included in the tool. Candidate gRNA molecules can be evaluated by art-known methods or as described in Section IV herein.

[0676] Guide RNAs (gRNAs) for use with S. pyogenes, S. aureus and N. meningitidis Cas9s were identified using a DNA sequence searching algorithm. Guide RNA design was carried out using a custom guide RNA design software based on the public tool cas-offinder (reference:Cas-OFFinder: a fast and versatile algorithm that searches for potential off-target sites of Cas9 RNA-guided endonucleases., Bioinformatics. 2014 Feb. 17.Bae S1, Park J, Kim J S. PMID:24463181). Said custom guide RNA design software scores guides after calculating their genomewide off-target propensity. Typically matches ranging from perfect matches to 7 mismatches are considered for guides ranging in length from 17 to 24. Once the off-target sites are computationally determined, an aggregate score is calculated for each guide and summarized in a tabular output using a web-interface. In addition to identifying potential gRNA sites adjacent to PAM sequences, the software also identifies all PAM adjacent sequences that differ by 1, 2, 3 or more nucleotides from the selected gRNA sites. Genomic DNA sequence for each gene was obtained from the UCSC Genome browser and sequences were screened for repeat elements using the publically available RepeatMasker program. RepeatMasker searches input DNA sequences for repeated elements and regions of low complexity. The output is a detailed annotation of the repeats present in a given query sequence.

[0677] Following identification, gRNAs were ranked into tiers based on their distance to the target site, their orthogonality and presence of a 5′ G (based on identification of close matches in the human genome containing a relavant PAM, e.g., in the case of S. pyogenes, a NGG PAM, in the case of S. aureus, NNGRR (e.g., a NNGRRT or NNGRRV) PAM, and in the case of N. meningitides, a NNNNGATT or NNNNGCTT PAM. Orthogonality refers to the number of sequences in the human genome that contain a minimum number of mismatches to the target sequence. A “high level of orthogonality” or “good orthogonality” may, for example, refer to 20-mer gRNAs that have no identical sequences in the human genome besides the intended target, nor any sequences that contain one or two mismatches in the target sequence. Targeting domains with good orthogonality are selected to minimize off-target DNA cleavage.

[0678] As an example, for S. pyogenes and N. meningitides targets, 17-mer, or 20-mer gRNAs were designed. As another example, for S. aureus targets, 18-mer, 19-mer, 20-mer, 21-mer, 22-mer, 23-mer and 24-mer gRNAs were designed. Tarteting domains, disclosed herein, may comprise the 17-mer described in Tables 1-3, 4A-4E, 5A-5F, or 6A-6D, e.g., the targeting domains of 18 or more nucleotides may comprise the 17-mer gRNAs described in Tables 1-3, 4A-4E, 5A-5F, or 6A-6D. Tarteting domains, disclosed herein, may comprises the 18-mer described in Tables 1-3, 4A-4E, 5A-5F, or 6A-6D, e.g., the targeting domains of 19 or more nucleotides may comprise the 18-mer gRNAs described in Tables 1-3, 4A-4E, 5A-5F, or 6A-6D. Tarteting domains, disclosed herein, may comprises the 19-mer described in Tables 1-3, 4A-4E, 5A-5F, or 6A-6D, e.g., the targeting domains of 20 or more nucleotides may comprise the 19-mer gRNAs described in Tables 1-3, 4A-4E, 5A-5F, or 6A-6D. Tarteting domains, disclosed herein, may comprises the 20-mer gRNAs described in Tables 1-3, 4A-4E, 5A-5F, or 6A-6D, e.g., the targeting domains of 21 or more nucleotides may comprise the 20-mer gRNAs described in Tables 1-3, 4A-4E, 5A-5F, or 6A-6D. Tarteting domains, disclosed herein, may comprises the 21-mer described in Tables 1-3, 4A-4E, 5A-5F, or 6A-6D, e.g., the targeting domains of 22 or more nucleotides may comprise the 21-mer gRNAs described in Tables 1-3, 4A-4E, 5A-5F, or 6A-6D. Tarteting domains, disclosed herein, may comprises the 22-mer described in Tables 1-3, 4A-4E, 5A-5F, or 6A-6D, e.g., the targeting domains of 23 or more nucleotides may comprise the 22-mer gRNAs described in Tables 1-3, 4A-4E, 5A-5F, or 6A-6D. Tarteting domains, disclosed herein, may comprises the 23-mer described in Tables 1-3, 4A-4E, 5A-5F, or 6A-6D, e.g., the targeting domains of 24 or more nucleotides may comprise the 23-mer gRNAs described in Tables 1-3, 4A-4E, 5A-5F, or 6A-6D. Tarteting domains, disclosed herein, may comprises the 24-mer described in Tables 1-3, 4A-4E, 5A-5F, or 6A-6D, e.g., the targeting domains of 25 or more nucleotides may comprise the 24-mer gRNAs described in Tables 1-3, 4A-4E, 5A-5F, or 6A-6D.

[0679] gRNAs were identified for both single-gRNA nuclease cleavage and for a dual-gRNA paired “nickase” strategy. Criteria for selecting gRNAs and for determing which gRNAs are used in a selected strategy is based on several considerations:
[0680] 1. gRNA pairs should be oriented on the DNA such that PAMs are facing out and cutting with the D10A Cas9 nickase will result in 5′ overhangs.
[0681] 2. An assumption that cleaving with dual nickase pairs results in deletion of the entire intervening sequence at a reasonable frequency. However, use of dual nickase pairs also typically results in indel mutations at the site of only one of the gRNAs. Candidate pair members can be tested to determine how efficiently they remove the entire sequence versus producing indel mutations at the site of one gRNA.

[0682] The targeting domains discussed herein can be incorporated into the gRNAs described herein.

[0683] As an example, two strategies were utilized to identify gRNAs for use with S. pyogenes, S. aureus and N. meningitidis Cas9 enzymes.

[0684] In one strategy, gRNAs were designed for use with S. pyogenes Cas9 enzymes (Tables 1-3). While it can be desirable to have gRNAs start with a 5′G, this requirement was relaxed for some gRNAs in tier 1 to identify guides in the correct orientation, within a reasonable distance to the mutation and with a high level of orthogonality. To find a pair of gRNAs for the dual-nickase strategy, the distance from the mutation was extended or the requirement for the 5′G was removed. For selection of tier 2 gRNAs, the distance restriction was relaxed in some cases such that a longer sequence was scanned, but the 5′G was required for all gRNAs. Whether or not the distance requirement was relaxed depended on how many sites were found within the original search window. Tier 3 uses the same distance restriction as tier 2, but removes the requirement for a 5′G. Note that tiers are non-inclusive (each gRNA is listed only once).

[0685] As discussed above, gRNAs were identified for single-gRNA nuclease cleavage as well as for a dual-gRNA paired “nickase” strategy, as indicated.

[0686] In a second strategy, gRNAs were designed for use with S. pyogenes, S. aureus and N. meningitidis Cas9 enzymes. The gRNAs were identified and ranked into 4 tiers for S. pyogenes (Tables 4A-4E). The targeting domain to be used with S. pyogenes Cas9 enzymes for tier 1 gRNA molecules were selected based on (1) proximity to the mutation, e.g., within 200 bp (e.g., upstream or downstream) of mutation, (2) a high level of orthogonality, and (3) the presence of a 5′ G. For selection of tier 2 gRNAs, a reasonable distance and high orthogonality were required but the presence of a 5′G was not required. Tier 3 uses the same distance restriction and the requirement for a 5′G, but removes the requirement of good orthogonality. Tier 4 uses the same distance restriction but removes the requirement of good orthogonality and the 5′G. The gRNAs were identified and ranked into 5 tiers for S. aureus, when the relavent PAM was NNGRRT or NNGRRV (Tables 5A-5F). The targeting domain to be used with S. aureus Cas9 enzymes for tier 1 gRNA molecules were selected based on (1) proximity to the mutation, e.g., within 200 bp (e.g., upstream or downstream) of mutation, (2) a high level of orthogonality, (3) the presence of a 5′ G and (4) PAM was NNGRRT. For selection of tier 2 gRNAs, a reasonable distance and high orthogonality were required but the presence of a 5′G was not required, and PAM was NNGRRT. Tier 3 uses the same distance restriction and the requirement for a 5′G, but removes the requirement of good orthogonality, and PAM was NNGRRT. Tier 4 uses the same distance restriction but removes the requirement of good orthogonality and the 5′G, and PAM was NNGRRT. Tier 5 uses the same distance restriction but removes the requirement of good orthogonality and the 5′G, and PAM was NNGRRV. The gRNAs were identified and ranked into 4 tiers for N. meningitides (Tables 6A-6D). The targeting domain to be used with N. meningitides Cas9 enzymes for tier 1 gRNA molecules were selected based on (1) proximity to the mutation, e.g., within 200 bp (e.g., upstream or downstream) of mutation, (2) a high level of orthogonality, and (3) the presence of a 5′ G. For selection of tier 2 gRNAs, a reasonable distance and high orthogonality were required but the presence of a 5′G was not required. Tier 3 uses the same distance restriction and the requirement for a 5′G, but removes the requirement of good orthogonality. Tier 4 uses the same distance restriction but removes the requirement of good orthogonality and the 5′G. Note that tiers are non-inclusive (each gRNA is listed only once for the strategy). In certain instances, no gRNA was identified based on the criteria of the particular tier.

[0687] In an embodiment, when a single gRNA molecule is used to target a Cas9 nickase to create a single strand break in close proximity to the mutation, e.g., the gRNA is used to target either upstream of (e.g., within 200 bp upstream of the mutation), or downstream of (e.g., within 200 bp downstream of the mutation) in the USH2A gene.

[0688] In an embodiment, when a single gRNA molecule is used to target a Cas9 nuclease to create a double strand break to in close proximity to the mutation, e.g., the gRNA is used to target either upstream of (e.g., within 200 bp upstream of the mutation), or downstream of (e.g., within 200 bp downstream of the mutation) in the USH2A gene.

[0689] In an embodiment, dual targeting is used to create two double strand breaks to in close proximity to the mutation, e.g., the gRNA is used to target either upstream of (e.g., within 200 bp upstream of the mutation), or downstream of (e.g., within 200 bp downstream of the mutation) in the USH2A gene. In an embodiment, the first and second gRNAs are used target two Cas9 nucleases to flank, e.g., the first of gRNA is used to target upstream of (e.g., within 200 bp upstream of the mutation), and the second gRNA is used to target downstream of (e.g., within 200 bp downstream of the mutation) in the USH2A gene.

[0690] In an embodiment, dual targeting is used to create a double strand break and a pair of single strand breaks to delete a genomic sequence including the mutation. In an embodiment, the first, second and third gRNAs are used to target one Cas9 nuclease and two Cas9 nickases to flank, e.g., the first gRNA that will be used with the Cas9 nuclease is used to target upstream of (e.g., within 200 bp upstream of the mutation) or downstream of (e.g., within 200 bp downstream of the mutation), and the second and third gRNAs that will be used with the Cas9 nickase pair are used to target the opposite side of the mutation (e.g., within 200 bp upstream or downstream of the mutation) in the USH2A gene.

[0691] In an embodiment, when four gRNAs (e.g., two pairs) are used to target four Cas9 nickases to create four single strand breaks to delete genomic sequence including the mutation, the first pair and second pair of gRNAs are used to target four Cas9 nickases to flank, e.g., the first pair of gRNAs are used to target upstream of (e.g., within 200 bp upstream of the mutation), and the second pair of gRNAs are used to target downstream of (e.g., within 200 bp downstream of the mutation) in the USH2A gene.

[0692] Any of the targeting domains in the tables described herein can be used with a Cas9 nickase molecule to generate a single strand break.

[0693] Any of the targeting domains in the tables described herein can be used with a Cas9 nuclease molecule to generate a double strand break.

[0694] In an embodiment, dual targeting (e.g., dual nicking) is used to create two nicks on opposite DNA strands by using S. pyogenes, S. aureus and N. meningitidis Cas9 nickases with two targeting domains that are complementary to opposite DNA strands, e.g., a gRNA comprising any minus strand targeting domain may be paired any gRNA comprising a plus strand targeting domain provided that the two gRNAs are oriented on the DNA such that PAMs face outward and the distance between the 5′ ends of the gRNAs is 0-50 bp. Exemplary nickase pairs including selecting a targeting domain from Group A and a second targeting domain from Group B, or selecting a targeting domain from Group C and a second targeting domain from Group D, in Table 4E (for S. pyogenes), selecting a targeting domain from Group A and a second targeting domain from Group B in Table 5F (for S. aureus) or selecting a targeting domain from Group A and a second targeting domain from Group B in Table 6D (for N. meningitidis). It is contemplated herein that in an embodiment a targeting domain of Group A can be combined with any of the targeting domains of Group B, or a targeting domain of Group C can be combined with any of the targeting domains of Group D in Table 4E (for S. pyogenes). For example, USH2A-182 can be combined with USH2A-179, USH2A-177 can be combined with USH2A-176, or USH2A-187 can be combined with USH2A-176. It is contemplated herein that in an embodiment a targeting domain of Group A can be combined with any of the targeting domains of Group B in Table 5F (for S. aureus). For example, USH2A-288 can be combined with USH2A-448. It is contemplated herein that in an embodiment a targeting domain of Group A can be combined with any of the targeting domains of Group B in Table 6D (for N. meningitidis). For example, USH2A-266 can be combined with USH2A-261 or USH2A-268 can be combined with USH2A-261.

[0695] When two gRNAs designed for use to target two Cas9 molecules, one Cas9 can be one species, the second Cas9 can be from a different species. Both Cas9 species are used to generate a single or double-strand break, as desired.

[0696] Exemplary Targeting Domains

[0697] Table 1 provides targeting domains for the 2299delG site selected according to first tier parameters, and are selected based on the presence of a 5′ G, close proximity and orientation to mutation and orthogonality in the human genome. In an embodiment, the targeting domain is the exact complement of the target domain. Any of the targeting domains can be used with a Cas9 molecule that gives double stranded cleavage. Any of the targeting domains in the table can be used with single-stranded break nucleases (nickases). In an embodiment, dual targeting is used to create two nicks. In an embodiment, 20-mer dual nickase pairs are used, e.g., USH2A-1 and USH2A-6, or USH2A-2 and USH2A-6 are used. In an embodiment, 17-mer dual nickase pairs are used, e.g., USH2A-15 and USH2A-20, USH2A-15 and USH2A-22, USH2A-16 and USH2A-20, or USH2A-16 and USH2A-22 are used.

TABLE 1
1st Tier

| | selected based on the presence of a 5′ G (only | | | |
|---|---|---|---|---|
| | for USH2A-1, 2, 5, 6, 10, 11), close proximity and | | | |
| | orientation to mutation and orthogonality in the | | | |
| | human genome | | | |
| gRNA | DNA | Target Site Sequence | Target Site | Distance to |
| Name | Strand | (does not include PAM) | Length | mutation |
| USH2A-1 | − | GAGUGCAAAAAAGAAGCCAA | 20 | 16 bp downstream |
| USH2A-2 | − | GUUAGAUGUCACCAAUUGUA | 20 | 75 bp downstream |
| USH2A-5 | + | GGUGUCACACUGAAGUCCUU | 20 | 21 bp downstream |
| USH2A-6 | + | GCCAUGGAGGUUACACUGGC | 20 | 56 bp upstream |
| USH2A-10 | + | GUCACAGGCCUUACAAU | 17 | 75 bp downstream |
| USH2A-11 | + | GUCACACUGAAGUCCUU | 17 | 21 bp downstream |
| USH2A-15 | − | UGCAAAAAAGAAGCCAA | 17 | 16 bp downstream |
| USH2A-16 | − | UGCAGAGAAAACUUUUA | 17 | 52 bp downstream |
| USH2A-20 | + | UGUUCACUGAGCCAUGG | 17 | 43 bp upstream |
| USH2A-22 | + | AUGGAGGUUACACUGGC | 17 | 56 bp upstream |

[0698] Table 2 provides targeting domains for the 2299delG site selected according to Second Tier parameters, as described above, and are selected based on the presence of a 5′ G and reasonable proximity to mutation.

TABLE 2

| | Selected based on the presence of a 5′ G | | |
|---|---|---|---|
| 2nd Tier | and reasonable proximity to mutation | | |
| gRNA | DNA | Target Site Sequence | Target Site |
| Name | Strand | (does not include PAM) | Length |
| USH2A-3 | − | GCCUGUGACUGUGACACAGC | 20 |
| USH2A-4 | − | GACACAGCUGGAUCCCUCCC | 20 |
| USH2A-7 | − | GCAGAGAAAACUUUUAU | 17 |
| USH2A-8 | − | GUCUGUAAUGCUAAGAC | 17 |
| USH2A-9 | + | GCAUUACAGACAGUCCC | 17 |

[0699] Table 3 provides targeting domains for the 2299delG site selected according to Third Tier parameters, as described above, and are selected based on reasonable proximity to mutation.

TABLE 3

| | Selected based | | |
|---|---|---|---|
| 3rd Tier | on reasonable proximity to mutation | | |
| gRNA | DNA | Target Site Sequence | Target Site |
| Name | Strand | (does not include PAM) | Length |
| USH2A-12 | − | UGCCAGUGUAACCUCCA | 17 |
| USH2A-13 | − | UUCUGCAAUCCUCACUC | 17 |
| USH2A-14 | − | UCUGCAAUCCUCACUCU | 17 |
| USH2A-17 | + | AUAAAAGUUUUCUCUGC | 17 |
| USH2A-18 | + | UCACACUGCCCAGAGUG | 17 |
| USH2A-19 | + | AUUUGUUCACUGAGCCA | 17 |
| USH2A-21 | + | AGCCAUGGAGGUUACAC | 17 |
| USH2A-23 | + | CUACACUGCCCAGAGUG | 17 |
| USH2A-24 | − | AAAUUCUGCAAUCCUCACUC | 20 |
| USH2A-25 | − | AAUUCUGCAAUCCUCACUCU | 20 |
| USH2A-26 | − | ACACAGCUGGAUCCCUCCCU | 20 |
| USH2A-27 | − | ACCUGCAGAGAAAACUUUUA | 20 |
| USH2A-28 | − | ACUGUCUGUAAUGCUAAGAC | 20 |
| USH2A-29 | − | AGGUGUGAUCAUUGCAAUUU | 20 |
| USH2A-30 | − | AUAUUUUAUCUUUAGGGCUU | 20 |
| USH2A-31 | − | CCCUGCCAGUGUAACCUCCA | 20 |
| USH2A-32 | − | CCUGCAGAGAAAACUUUUAU | 20 |
| USH2A-33 | − | CUCCGAAGCUUUAAUGAUGU | 20 |
| USH2A-34 | − | CUGUCUGUAAUGCUAAGACA | 20 |
| USH2A-35 | + | ACAGUCACAGGCCUUACAAU | 20 |
| USH2A-36 | + | AGAAUUUGUUCACUGAGCCA | 20 |
| USH2A-37 | + | AUCCAACAUCAUUAAAGCUU | 20 |
| USH2A-38 | + | AUUACAGACAGUCCCAGGGA | 20 |
| USH2A-39 | + | AUUUGUUCACUGAGCCAUGG | 20 |
| USH2A-40 | + | CACUCACACUGCCCAGAGUG | 20 |
| USH2A-41 | + | CAUUACAGACAGUCCCAGGG | 20 |
| USH2A-42 | + | CCAUGGAGGUUACACUGGCA | 20 |
| USH2A-43 | + | CCCAUAAAAGUUUUCUCUGC | 20 |
| USH2A-44 | + | CUGAGCCAUGGAGGUUACAC | 20 |
| USH2A-45 | + | UAGCAUUACAGACAGUCCCA | 20 |
| USH2A-46 | + | UCCAGCUGUGUCACAGUCAC | 20 |
| USH2A-47 | + | UUAGCAUUACAGACAGUCCC | 20 |
| USH2A-48 | − | AAUAUAUUUUAUCUUUA | 17 |
| USH2A-49 | − | UUUUAUCUUUAGGGCUU | 17 |
| USH2A-50 | − | UGUGAUCAUUGCAAUUU | 17 |
| USH2A-51 | − | CGAAGCUUUAAUGAUGU | 17 |
| USH2A-52 | − | AGAUGUCACCAAUUGUA | 17 |
| USH2A-53 | − | UGUGACUGUGACACAGC | 17 |
| USH2A-54 | − | ACAGCUGGAUCCCUCCC | 17 |
| USH2A-55 | − | CAGCUGGAUCCCUCCCU | 17 |
| USH2A-56 | − | UCUGUAAUGCUAAGACA | 17 |
| USH2A-57 | + | CAUUACAGACAGUCCCA | 17 |
| USH2A-58 | + | UACAGACAGUCCCAGGG | 17 |
| USH2A-59 | + | ACAGACAGUCCCAGGGA | 17 |
| USH2A-60 | + | AGCUGUGUCACAGUCAC | 17 |
| USH2A-61 | + | UGGAGGUUACACUGGCA | 17 |
| USH2A-62 | + | CAACAUCAUUAAAGCUU | 17 |

[0700] Table 4A provides targeting domains for the 2299delG site in the USH2A gene selected according to the first tier parameters. The targeting domains are within 200 bases of the 2299deG site, have good orthogonality, and start with G. It is contemplated herein that in an embodiment the targeting domain hybridizes to the target domain through complementary base pairing. Any of the targeting domains in the table can be used with a S. pyogenes Cas9 molecule that generates a double stranded break (Cas9 nuclease) or a single-stranded break (Cas9 nickase).

TABLE 4A

| | DNA | | Target Site |
|---|---|---|---|
| gRNA Name | Strand | Targeting Domain | Length |
| USH2A-230 | − | GCAAGCCCAAUGUUGAA | 17 |
| USH2A-225 | + | GCAUUACAGACAGUCCC | 17 |
| USH2A-221 | + | GUCACACUGAAGUCCUU | 17 |
| USH2A-217 | + | GUCACAGGCCUUACAAU | 17 |
| USH2A-226 | − | GUCUGUAAUGCUAAGAC | 17 |
| USH2A-198 | − | GACACAGCUGGAUCCCUCCC | 20 |
| USH2A-204 | − | GAGACAGUGCAAUAAAUGUU | 20 |
| USH2A-184 | + | GCACUACACUGCCCAGAGUG | 20 |
| USH2A-197 | + | GCACUGUCUCCCUUCAACAU | 20 |
| USH2A-194 | + | GCCAUGGAGGUUACACUGGC | 20 |
| USH2A-192 | − | GCCUGUGACUGUGACACAGC | 20 |
| USH2A-188 | + | GGUGUCACACUGAAGUCCUU | 20 |
| USH2A-179 | − | GUUAGAUGUCACCAAUUGUA | 20 |

[0701] Table 4B provides targeting domains for the 2299delG site in the USH2A gene selected according to the second tier parameters. The targeting domains are within 200 bases of the 2299deG site, have good orthogonality, and do not start with G. It is contemplated herein that in an embodiment the targeting domain hybridizes to the target domain through complementary base pairing. Any of the targeting domains in the table can be used with a S. pyogenes Cas9 molecule that generates a double stranded break (Cas9 nuclease) or a single-stranded break (Cas9 nickase).

TABLE 4B

| | DNA | | Target |
|---|---|---|---|
| gRNA Name | Strand | Targeting Domain | Site Length |
| USH2A-244 | − | ACAGCUGGAUCCCUCCC | 17 |
| USH2A-237 | − | ACAGUGCAAUAAAUGUU | 17 |
| USH2A-220 | − | AGAUGUCACCAAUUGUA | 17 |
| USH2A-231 | + | AGCCAUGGAGGUUACAC | 17 |
| USH2A-241 | + | AUAAAAGUUUUCUCUGC | 17 |
| USH2A-219 | + | AUGGAGGUUACACUGGC | 17 |
| USH2A-247 | + | AUUUAAAAGGUGAGGAU | 17 |
| USH2A-245 | + | AUUUGUUCACUGAGCCA | 17 |
| USH2A-242 | + | CAACAUCAUUAAAGCUU | 17 |
| USH2A-228 | − | CAGCUGGAUCCCUCCCU | 17 |
| USH2A-222 | + | CAUUACAGACAGUCCCA | 17 |
| USH2A-218 | − | CGAAGCUUUAAUGAUGU | 17 |
| USH2A-235 | + | CUACACUGCCCAGAGUG | 17 |
| USH2A-234 | + | CUGUCUCCCUUCAACAU | 17 |
| USH2A-232 | + | UACAGACAGUCCCAGGG | 17 |
| USH2A-229 | − | UCUGCAAUCCUCACUCU | 17 |
| USH2A-224 | − | UCUGUAAUGCUAAGACA | 17 |
| USH2A-240 | − | UGCAAGCCCAAUGUUGA | 17 |
| USH2A-246 | − | UGCAGAGAAAACUUUUA | 17 |
| USH2A-233 | − | UGCCAGUGUAACCUCCA | 17 |
| USH2A-227 | + | UGGAGGUUACACUGGCA | 17 |
| USH2A-223 | + | UGUCUCCCUUCAACAUU | 17 |
| USH2A-238 | − | UGUGAUCAUUGCAAUUU | 17 |
| USH2A-239 | + | UGUUCACUGAGCCAUGG | 17 |
| USH2A-236 | − | UUCUGCAAUCCUCACUC | 17 |
| USH2A-243 | − | UUUUAUCUUUAGGGCUU | 17 |
| USH2A-178 | − | AAAUUCUGCAAUCCUCACUC | 20 |
| USH2A-186 | − | AAUUCUGCAAUCCUCACUCU | 20 |
| USH2A-191 | − | ACACAGCUGGAUCCCUCCCU | 20 |
| USH2A-175 | + | ACAGUCACAGGCCUUACAAU | 20 |
| USH2A-206 | − | ACAGUGCAAUAAAUGUUUGG | 20 |
| USH2A-201 | − | ACCUGCAGAGAAAACUUUUA | 20 |
| USH2A-196 | − | ACUGUCUGUAAUGCUAAGAC | 20 |
| USH2A-199 | + | AGAAUUUGUUCACUGAGCCA | 20 |
| USH2A-185 | − | AGGUGUGAUCAUUGCAAUUU | 20 |
| USH2A-193 | − | AUAUUUUAUCUUUAGGGCUU | 20 |
| USH2A-202 | + | AUCCAACAUCAUUAAAGCUU | 20 |
| USH2A-176 | − | AUCUGCAAGCCCAAUGUUGA | 20 |
| USH2A-205 | + | AUUACAGACAGUCCCAGGGA | 20 |
| USH2A-200 | + | CACUGUCUCCCUUCAACAUU | 20 |
| USH2A-203 | − | CAGUGCAAUAAAUGUUUGGA | 20 |
| USH2A-177 | + | CAUUACAGACAGUCCCAGGG | 20 |
| USH2A-180 | + | CCAUGGAGGUUACACUGGCA | 20 |
| USH2A-182 | + | CCCAUAAAAGUUUUCUCUGC | 20 |
| USH2A-183 | − | CCCUGCCAGUGUAACCUCCA | 20 |
| USH2A-174 | − | CUCCGAAGCUUUAAUGAUGU | 20 |
| USH2A-189 | + | CUGAGCCAUGGAGGUUACAC | 20 |
| USH2A-181 | − | CUGUCUGUAAUGCUAAGACA | 20 |
| USH2A-187 | + | UAGCAUUACAGACAGUCCCA | 20 |
| USH2A-190 | − | UCUGCAAGCCCAAUGUUGAA | 20 |
| USH2A-195 | + | UUAGCAUUACAGACAGUCCC | 20 |

[0702] Table 4C provides targeting domains for the 2299delG site in the USH2A gene selected according to the third tier parameters. The targeting domains are within 200 bases of the 2299deG site, and start with G. It is contemplated herein that in an embodiment the targeting domain hybridizes to the target domain through complementary base pairing. Any of the targeting domains in the table can be used with a S. pyogenes Cas9 molecule that generates a double stranded break (Cas9 nuclease) or a single-stranded break (Cas9 nickase).

TABLE 4C

| | DNA | | Target Site |
|---|---|---|---|
| gRNA Name | Strand | Targeting Domain | Length |
| USH2A-259 | + | GAUAAAAUAUAUUUAAA | 17 |
| USH2A-249 | − | GCAGAGAAAACUUUUAU | 17 |
| USH2A-255 | − | GUGCAAUAAAUGUUUGG | 17 |

[0703] Table 4D provides targeting domains for the 2299delG site in the USH2A gene selected according to the fourth tier parameters. The targeting domains are within 200 bases of the 2299deG site. It is contemplated herein that in an embodiment the targeting domain hybridizes to the target domain through complementary base pairing. Any of the targeting domains in the table can be used with a S. pyogenes Cas9 molecule that generates a double stranded break (Cas9 nuclease) or a single-stranded break (Cas9 nickase).

TABLE 4D
4th Tier

| | DNA | | Target Site |
|---|---|---|---|
| gRNA Name | Strand | Targeting Domain | Length |
| USH2A-258 | − | AAAUAUAUUUUAUCUUU | 17 |
| USH2A-257 | + | AAUAUAUUUAAAAGGUG | 17 |
| USH2A-253 | − | AAUAUAUUUUAUCUUUA | 17 |
| USH2A-251 | + | ACAGACAGUCCCAGGGA | 17 |
| USH2A-254 | + | AGCUGUGUCACAGUCAC | 17 |
| USH2A-252 | + | UAUUUAAAAGGUGAGGA | 17 |
| USH2A-256 | − | UGCAAAAAAGAAGCCAA | 17 |
| USH2A-248 | − | UGCAAUAAAUGUUUGGA | 17 |
| USH2A-250 | − | UGUGACUGUGACACAGC | 17 |
| USH2A-216 | + | AAAGAUAAAAUAUAUUUAAA | 20 |
| USH2A-208 | + | AUAUAUUUAAAAGGUGAGGA | 20 |
| USH2A-210 | + | AUUUGUUCACUGAGCCAUGG | 20 |
| USH2A-211 | − | CCUGCAGAGAAAACUUUUAU | 20 |
| USH2A-209 | + | UAAAAUAUAUUUAAAAGGUG | 20 |
| USH2A-212 | − | UAGUGCAAAAAAGAAGCCAA | 20 |
| USH2A-207 | + | UAUAUUUAAAAGGUGAGGAU | 20 |
| USH2A-215 | + | UCCAGCUGUGUCACAGUCAC | 20 |
| USH2A-213 | − | UUAAAUAUAUUUUAUCUUUA | 20 |
| USH2A-214 | − | UUUAAAUAUAUUUUAUCUUU | 20 |

[0704] Table 4E provides targeting domains for the 2299delG site in the USH2A gene that can be used for dual targeting. Any of the targeting domains in the table can be used with a S. pyogenes Cas9 (nickase) molecule to generate a single stranded break.

[0705] Exemplary nickase pairs including selecting a targeting domain from Group A and a second targeting domain from Group B, or a targeting domain from Group C and a second targeting domain from Group D. It is contemplated herein that in an embodiment a targeting domain of Group A can be combined with any of the targeting domains of Group B or a targeting domain of Group C can be combined with any of the targeting domains of Group D. For example, USH2A-182 can be combined with USH2A-179, USH2A-177 can be combined with USH2A-176, or USH2A-187 can be combined with USH2A-176.

TABLE 4E

| Group A | Group B | Group C | Group D |
|---|---|---|---|
| USH2A-182 | USH2A-179 | USH2A-177 | USH2A-176 |
| | | USH2A-187 | |

[0706] Table 5A provides targeting domains for the 2299delG site in the USH2A selected according to the first tier parameters. The targeting domains are within 200 bases of the 2299deG site, have good orthogonality, start with G and PAM is NNGRRT. It is contemplated herein that in an embodiment the targeting domain hybridizes to the target domain through complementary base pairing. Any of the targeting domains in the table can be used with a S. aureus Cas9 molecule that generates a double stranded break (Cas9 nuclease) or a single-stranded break (Cas9 nickase).

TABLE 5A

| | | | Target |
|---|---|---|---|
| | DNA | | Site |
| gRNA Name | Strand | Targeting Domain | Length |
| USH2A-292 | + | GCACUACACUGCCCAGAGU | 19 |
| USH2A-298 | − | GCCUGUGACUGUGACACAG | 19 |
| USH2A-297 | − | GGCCUGUGACUGUGACACAG | 20 |
| USH2A-284 | − | GGUGUGAUCAUUGCAAUU | 18 |
| USH2A-448 | − | GACACCUGCAGAGAAAACUUUU | 22 |
| USH2A-445 | + | GCAUUACAGACAGUCCCAGGG | 21 |
| USH2A-427 | − | GCUUAGGUGUGAUCAUUGCAAUU | 23 |
| USH2A-430 | + | GCUUCUUUUUUGCACUACACUGCC | 24 |
| USH2A-426 | − | GGCUUAGGUGUGAUCAUUGCAAUU | 24 |
| USH2A-438 | − | GUAAGGCCUGUGACUGUGACACAG | 24 |
| USH2A-446 | − | GUGACACCUGCAGAGAAAACUUUU | 24 |

[0707] Table 5B provides targeting domains for the 2299delG site in the USH2A selected according to the second tier parameters. The targeting domains are within 200 bases of the 2299deG site, have good orthogonality and PAM is NNGRRT. It is contemplated herein that in an embodiment the targeting domain hybridizes to the target domain through complementary base pairing. Any of the targeting domains in the table can be used with a S. aureus Cas9 molecule that generates a double stranded break (Cas9 nuclease) or a single-stranded break (Cas9 nickase).

TABLE 5B

| | | | Target |
|---|---|---|---|
| | DNA | | Site |
| gRNA Name | Strand | Targeting Domain | Length |
| USH2A-295 | − | ACCUGCAGAGAAAACUUUU | 19 |
| USH2A-288 | + | ACUGCCCAGAGUGAGGAUUG | 20 |
| USH2A-283 | − | AGGUGUGAUCAUUGCAAUU | 19 |
| USH2A-280 | + | AUUACAGACAGUCCCAGGG | 19 |
| USH2A-294 | − | CACCUGCAGAGAAAACUUUU | 20 |
| USH2A-293 | + | CACUACACUGCCCAGAGU | 18 |
| USH2A-279 | + | CAUUACAGACAGUCCCAGGG | 20 |
| USH2A-296 | − | CCUGCAGAGAAAACUUUU | 18 |
| USH2A-299 | − | CCUGUGACUGUGACACAG | 18 |
| USH2A-277 | − | CUCCGAAGCUUUAAUGAUG | 19 |
| USH2A-289 | + | CUGCCCAGAGUGAGGAUUG | 19 |
| USH2A-285 | + | CUUUUUUGCACUACACUGCC | 20 |
| USH2A-282 | − | UAGGUGUGAUCAUUGCAAUU | 20 |
| USH2A-278 | − | UCCGAAGCUUUAAUGAUG | 18 |
| USH2A-276 | − | UCUCCGAAGCUUUAAUGAUG | 20 |
| USH2A-291 | + | UGCACUACACUGCCCAGAGU | 20 |
| USH2A-290 | + | UGCCCAGAGUGAGGAUUG | 18 |
| USH2A-281 | + | UUACAGACAGUCCCAGGG | 18 |
| USH2A-287 | + | UUUUUGCACUACACUGCC | 18 |
| USH2A-286 | + | UUUUUUGCACUACACUGCC | 19 |
| USH2A-440 | − | AAGGCCUGUGACUGUGACACAG | 22 |
| USH2A-450 | − | AAUUUCUCCGAAGCUUUAAUGAUG | 24 |
| USH2A-449 | − | ACACCUGCAGAGAAAACUUUU | 21 |
| USH2A-456 | + | ACACUGCCCAGAGUGAGGAUUG | 22 |
| USH2A-444 | + | AGCAUUACAGACAGUCCCAGGG | 22 |
| USH2A-441 | − | AGGCCUGUGACUGUGACACAG | 21 |
| USH2A-451 | − | AUUUCUCCGAAGCUUUAAUGAUG | 23 |
| USH2A-457 | + | CACUGCCCAGAGUGAGGAUUG | 21 |
| USH2A-454 | + | CUACACUGCCCAGAGUGAGGAUUG | 24 |
| USH2A-428 | − | CUUAGGUGUGAUCAUUGCAAUU | 22 |
| USH2A-431 | + | CUUCUUUUUUGCACUACACUGCC | 23 |
| USH2A-439 | − | UAAGGCCUGUGACUGUGACACAG | 23 |
| USH2A-455 | + | UACACUGCCCAGAGUGAGGAUUG | 23 |
| USH2A-443 | + | UAGCAUUACAGACAGUCCCAGGG | 23 |
| USH2A-433 | + | UCUUUUUUGCACUACACUGCC | 21 |
| USH2A-447 | − | UGACACCUGCAGAGAAAACUUUU | 23 |
| USH2A-442 | + | UUAGCAUUACAGACAGUCCCAGGG | 24 |
| USH2A-429 | − | UUAGGUGUGAUCAUUGCAAUU | 21 |
| USH2A-453 | − | UUCUCCGAAGCUUUAAUGAUG | 21 |
| USH2A-432 | + | UUCUUUUUUGCACUACACUGCC | 22 |
| USH2A-437 | + | UUGCACUACACUGCCCAGAGU | 21 |
| USH2A-452 | − | UUUCUCCGAAGCUUUAAUGAUG | 22 |
| USH2A-436 | + | UUUGCACUACACUGCCCAGAGU | 22 |
| USH2A-435 | + | UUUUGCACUACACUGCCCAGAGU | 23 |
| USH2A-434 | + | UUUUUGCACUACACUGCCCAGAGU | 24 |

[0708] Table 5C provides targeting domains for the 2299delG site in the USH2A selected according to the third tier parameters. The targeting domains are within 200 bases of the 2299deG site, start with 5′ G and PAM is NNGRRT. It is contemplated herein that in an embodiment the targeting domain hybridizes to the target domain through complementary base pairing. Any of the targeting domains in the table can be used with a S. aureus Cas9 molecule that generates a double stranded break (Cas9 nuclease) or a single-stranded break (Cas9 nickase).

TABLE 5C

| | DNA | | Target Site |
|---|---|---|---|
| gRNA Name | Strand | Targeting Domain | Length |
| USH2A-461 | + | GAUAAAAUAUAUUUAAAAGGU | 21 |

[0709] Table 5D provides targeting domains for the 2299delG site in the USH2A selected according to the fourth tier parameters. The targeting domains are within 200 bases of the 2299deG site and PAM is NNGRRT. It is contemplated herein that in an embodiment the targeting domain hybridizes to the target domain through complementary base pairing. Any of the targeting domains in the table can be used with a S. aureus Cas9 molecule that generates a double stranded break (Cas9 nuclease) or a single-stranded break (Cas9 nickase).

TABLE 5D
4th Tier

| | | | Target |
|---|---|---|---|
| | DNA | | Site |
| gRNA Name | Strand | Targeting Domain | Length |
| USH2A-300 | + | AUAAAAUAUAUUUAAAAGGU | 20 |
| USH2A-301 | + | UAAAAUAUAUUUAAAAGGU | 19 |
| USH2A-302 | + | AAAAUAUAUUUAAAAGGU | 18 |
| USH2A-458 | + | AAAGAUAAAAUAUAUUUAAAAGGU | 24 |
| USH2A-459 | + | AAGAUAAAAUAUAUUUAAAAGGU | 23 |
| USH2A-460 | + | AGAUAAAAUAUAUUUAAAAGGU | 22 |

[0710] Table 5E provides targeting domains for the 2299delG site in the USH2A selected according to the fifth tier parameters. The targeting domains are within 200 bases of the 2299deG site and PAM is NNGRRV. It is contemplated herein that in an embodiment the targeting domain hybridizes to the target domain through complementary base pairing. Any of the targeting domains in the table can be used with a S. aureus Cas9 molecule that generates a double stranded break (Cas9 nuclease) or a single-stranded break (Cas9 nickase).

TABLE 5E

| | | | Target |
|---|---|---|---|
| | DNA | | Site |
| gRNA Name | Strand | Targeting Domain | Length |
| USH2A-303 | + | AUAUAUUUAAAAGGUGAGGA | 20 |
| USH2A-304 | + | UAUAUUUAAAAGGUGAGGA | 19 |
| USH2A-305 | + | AUAUUUAAAAGGUGAGGA | 18 |
| USH2A-306 | + | UUUUCUCUGCAGGUGUCACA | 20 |
| USH2A-307 | + | UUUCUCUGCAGGUGUCACA | 19 |
| USH2A-308 | + | UUCUCUGCAGGUGUCACA | 18 |
| USH2A-309 | + | UGCACUGUCUCCCUUCAACA | 20 |
| USH2A-310 | + | GCACUGUCUCCCUUCAACA | 19 |
| USH2A-311 | + | CACUGUCUCCCUUCAACA | 18 |
| USH2A-312 | − | GUGCAUCUGCAAGCCCAAUG | 20 |
| USH2A-313 | − | UGCAUCUGCAAGCCCAAUG | 19 |
| USH2A-314 | − | GCAUCUGCAAGCCCAAUG | 18 |
| USH2A-315 | − | CAAAUUCUGCAAUCCUCACU | 20 |
| USH2A-316 | − | AAAUUCUGCAAUCCUCACU | 19 |
| USH2A-317 | − | AAUUCUGCAAUCCUCACU | 18 |
| USH2A-318 | − | UCUGCAAGCCCAAUGUUGAA | 20 |
| USH2A-319 | − | CUGCAAGCCCAAUGUUGAA | 19 |
| USH2A-320 | − | UGCAAGCCCAAUGUUGAA | 18 |
| USH2A-321 | + | UUAGCAUUACAGACAGUCCC | 20 |
| USH2A-322 | + | UAGCAUUACAGACAGUCCC | 19 |
| USH2A-323 | + | AGCAUUACAGACAGUCCC | 18 |
| USH2A-324 | − | GACAGUGCAAUAAAUGUUUG | 20 |
| USH2A-325 | − | ACAGUGCAAUAAAUGUUUG | 19 |
| USH2A-326 | − | CAGUGCAAUAAAUGUUUG | 18 |
| USH2A-327 | − | UGACACAGCUGGAUCCCUCC | 20 |
| USH2A-328 | − | GACACAGCUGGAUCCCUCC | 19 |
| USH2A-329 | − | ACACAGCUGGAUCCCUCC | 18 |
| USH2A-330 | + | CUUAGCAUUACAGACAGUCC | 20 |
| USH2A-331 | + | UUAGCAUUACAGACAGUCC | 19 |
| USH2A-332 | + | UAGCAUUACAGACAGUCC | 18 |
| USH2A-333 | − | AAUUUUGGAUUUAAAUUUCU | 20 |
| USH2A-334 | − | AUUUUGGAUUUAAAUUUCU | 19 |
| USH2A-335 | − | UUUUGGAUUUAAAUUUCU | 18 |
| USH2A-336 | + | UUUGCACUACACUGCCCAGA | 20 |
| USH2A-337 | + | UUGCACUACACUGCCCAGA | 19 |
| USH2A-338 | + | UGCACUACACUGCCCAGA | 18 |
| USH2A-339 | − | GGAGACAGUGCAAUAAAUGU | 20 |
| USH2A-340 | − | GAGACAGUGCAAUAAAUGU | 19 |
| USH2A-341 | − | AGACAGUGCAAUAAAUGU | 18 |
| USH2A-342 | + | AAUGAUUUCAUUCAAGAUAG | 20 |
| USH2A-343 | + | AUGAUUUCAUUCAAGAUAG | 19 |
| USH2A-344 | + | UGAUUUCAUUCAAGAUAG | 18 |
| USH2A-345 | − | ACAGUGCAAUAAAUGUUUGG | 20 |
| USH2A-346 | − | CAGUGCAAUAAAUGUUUGG | 19 |
| USH2A-347 | − | AGUGCAAUAAAUGUUUGG | 18 |
| USH2A-348 | + | AGAUAAAAUAUAUUUAAAAG | 20 |
| USH2A-349 | + | GAUAAAAUAUAUUUAAAAG | 19 |
| USH2A-350 | + | AUAAAAUAUAUUUAAAAG | 18 |
| USH2A-351 | + | UAUAUUUAAAAGGUGAGGAU | 20 |
| USH2A-352 | + | AUAUUUAAAAGGUGAGGAU | 19 |
| USH2A-353 | + | UAUUUAAAAGGUGAGGAU | 18 |
| USH2A-354 | − | CUGGGCAGUGUAGUGCAAAA | 20 |
| USH2A-355 | − | UGGGCAGUGUAGUGCAAAA | 19 |
| USH2A-356 | − | GGGCAGUGUAGUGCAAAA | 18 |
| USH2A-357 | + | CCAACAUCAUUAAAGCUUCG | 20 |
| USH2A-358 | + | CAACAUCAUUAAAGCUUCG | 19 |
| USH2A-359 | + | AACAUCAUUAAAGCUUCG | 18 |
| USH2A-360 | − | UUGUGUCUCGUCUAUCUUGA | 20 |
| USH2A-361 | − | UGUGUCUCGUCUAUCUUGA | 19 |
| USH2A-362 | − | GUGUCUCGUCUAUCUUGA | 18 |
| USH2A-363 | + | UAGCAUUACAGACAGUCCCA | 20 |
| USH2A-364 | + | AGCAUUACAGACAGUCCCA | 19 |
| USH2A-365 | + | GCAUUACAGACAGUCCCA | 18 |
| USH2A-366 | − | AUCUGCAAGCCCAAUGUUGA | 20 |
| USH2A-367 | − | UCUGCAAGCCCAAUGUUGA | 19 |
| USH2A-368 | − | CUGCAAGCCCAAUGUUGA | 18 |
| USH2A-369 | − | UUUUAAAUAUAUUUUAUCUU | 20 |
| USH2A-370 | − | UUUAAAUAUAUUUUAUCUU | 19 |
| USH2A-371 | − | UUAAAUAUAUUUUAUCUU | 18 |
| USH2A-372 | + | CAUCCAACAUCAUUAAAGCU | 20 |
| USH2A-373 | + | AUCCAACAUCAUUAAAGCU | 19 |
| USH2A-374 | + | UCCAACAUCAUUAAAGCU | 18 |
| USH2A-375 | + | GCAUUACAGACAGUCCCAGG | 20 |
| USH2A-376 | + | CAUUACAGACAGUCCCAGG | 19 |
| USH2A-377 | + | AUUACAGACAGUCCCAGG | 18 |
| USH2A-378 | + | CAGAAUUUGUUCACUGAGCC | 20 |
| USH2A-379 | + | AGAAUUUGUUCACUGAGCC | 19 |
| USH2A-380 | + | GAAUUUGUUCACUGAGCC | 18 |
| USH2A-381 | − | ACUUCAGUGUGACACCUGCA | 20 |
| USH2A-382 | − | CUUCAGUGUGACACCUGCA | 19 |
| USH2A-383 | − | UUCAGUGUGACACCUGCA | 18 |
| USH2A-384 | − | CAGUGCAAUAAAUGUUUGGA | 20 |
| USH2A-385 | − | AGUGCAAUAAAUGUUUGGA | 19 |
| USH2A-386 | − | GUGCAAUAAAUGUUUGGA | 18 |
| USH2A-387 | − | GAGACAGUGCAAUAAAUGUU | 20 |
| USH2A-388 | − | AGACAGUGCAAUAAAUGUU | 19 |
| USH2A-389 | − | GACAGUGCAAUAAAUGUU | 18 |
| USH2A-390 | − | AAGCUUUAAUGAUGUUGGAU | 20 |
| USH2A-391 | − | AGCUUUAAUGAUGUUGGAU | 19 |
| USH2A-392 | − | GCUUUAAUGAUGUUGGAU | 18 |
| USH2A-393 | + | AAUAUAUUUAAAAGGUGAGG | 20 |
| USH2A-394 | + | AUAUAUUUAAAAGGUGAGG | 19 |
| USH2A-395 | + | UAUAUUUAAAAGGUGAGG | 18 |
| USH2A-396 | − | GGACUUCAGUGUGACACCUG | 20 |
| USH2A-397 | − | GACUUCAGUGUGACACCUG | 19 |
| USH2A-398 | − | ACUUCAGUGUGACACCUG | 18 |
| USH2A-399 | + | AUCCAACAUCAUUAAAGCUU | 20 |
| USH2A-400 | + | UCCAACAUCAUUAAAGCUU | 19 |
| USH2A-401 | + | CCAACAUCAUUAAAGCUU | 18 |
| USH2A-402 | − | AGUGUAACCUCCAUGGCUCA | 20 |
| USH2A-403 | − | GUGUAACCUCCAUGGCUCA | 19 |
| USH2A-404 | − | UGUAACCUCCAUGGCUCA | 18 |
| USH2A-405 | + | AGAAUUUGUUCACUGAGCCA | 20 |
| USH2A-406 | + | GAAUUUGUUCACUGAGCCA | 19 |
| USH2A-407 | + | AAUUUGUUCACUGAGCCA | 18 |
| USH2A-408 | − | GUAGUGCAAAAAAGAAGCCA | 20 |
| USH2A-409 | − | UAGUGCAAAAAAGAAGCCA | 19 |
| USH2A-410 | − | AGUGCAAAAAAGAAGCCA | 18 |
| USH2A-411 | − | CAUCUGCAAGCCCAAUGUUG | 20 |
| USH2A-412 | − | AUCUGCAAGCCCAAUGUUG | 19 |
| USH2A-413 | − | UCUGCAAGCCCAAUGUUG | 18 |
| USH2A-414 | − | GACUGUCUGUAAUGCUAAGA | 20 |
| USH2A-415 | − | ACUGUCUGUAAUGCUAAGA | 19 |
| USH2A-416 | − | CUGUCUGUAAUGCUAAGA | 18 |
| USH2A-417 | − | GACACAGCUGGAUCCCUCCC | 20 |
| USH2A-418 | − | ACACAGCUGGAUCCCUCCC | 19 |
| USH2A-419 | − | CACAGCUGGAUCCCUCCC | 18 |
| USH2A-420 | + | AGGAUUGCAGAAUUUGUUCA | 20 |
| USH2A-421 | + | GGAUUGCAGAAUUUGUUCA | 19 |
| USH2A-422 | + | GAUUGCAGAAUUUGUUCA | 18 |
| USH2A-423 | + | AGCCAUGGAGGUUACACUGG | 20 |
| USH2A-424 | + | GCCAUGGAGGUUACACUGG | 19 |
| USH2A-425 | + | CCAUGGAGGUUACACUGG | 18 |
| USH2A-462 | + | CUCACAUCCAACAUCAUUAAAGCU | 24 |
| USH2A-463 | + | UCACAUCCAACAUCAUUAAAGCU | 23 |
| USH2A-464 | + | CACAUCCAACAUCAUUAAAGCU | 22 |
| USH2A-465 | + | ACAUCCAACAUCAUUAAAGCU | 21 |
| USH2A-466 | + | AUUGCAGAAUUUGUUCACUGAGCC | 24 |
| USH2A-467 | + | UUGCAGAAUUUGUUCACUGAGCC | 23 |
| USH2A-468 | + | UGCAGAAUUUGUUCACUGAGCC | 22 |
| USH2A-469 | + | GCAGAAUUUGUUCACUGAGCC | 21 |
| USH2A-470 | − | CUGGGACUGUCUGUAAUGCUAAGA | 24 |
| USH2A-471 | − | UGGGACUGUCUGUAAUGCUAAGA | 23 |
| USH2A-472 | − | GGGACUGUCUGUAAUGCUAAGA | 22 |
| USH2A-473 | − | GGACUGUCUGUAAUGCUAAGA | 21 |
| USH2A-474 | + | UUGCAGAAUUUGUUCACUGAGCCA | 24 |
| USH2A-475 | + | UGCAGAAUUUGUUCACUGAGCCA | 23 |
| USH2A-476 | + | GCAGAAUUUGUUCACUGAGCCA | 22 |
| USH2A-477 | + | CAGAAUUUGUUCACUGAGCCA | 21 |
| USH2A-478 | − | GAAGGGAGACAGUGCAAUAAAUGU | 24 |
| USH2A-479 | − | AAGGGAGACAGUGCAAUAAAUGU | 23 |
| USH2A-480 | − | AGGGAGACAGUGCAAUAAAUGU | 22 |
| USH2A-481 | − | GGGAGACAGUGCAAUAAAUGU | 21 |
| USH2A-482 | + | AAAGUUUUCUCUGCAGGUGUCACA | 24 |
| USH2A-483 | + | AAGUUUUCUCUGCAGGUGUCACA | 23 |
| USH2A-484 | + | AGUUUUCUCUGCAGGUGUCACA | 22 |
| USH2A-485 | + | GUUUUCUCUGCAGGUGUCACA | 21 |
| USH2A-486 | + | CUUAGCAUUACAGACAGUCCCAGG | 24 |
| USH2A-487 | + | UUAGCAUUACAGACAGUCCCAGG | 23 |
| USH2A-488 | + | UAGCAUUACAGACAGUCCCAGG | 22 |
| USH2A-489 | + | AGCAUUACAGACAGUCCCAGG | 21 |
| USH2A-490 | + | CUAAAGAUAAAAUAUAUUUAAAAG | 24 |
| USH2A-491 | + | UAAAGAUAAAAUAUAUUUAAAAG | 23 |
| USH2A-492 | + | AAAGAUAAAAUAUAUUUAAAAG | 22 |
| USH2A-493 | + | AAGAUAAAAUAUAUUUAAAAG | 21 |
| USH2A-494 | − | UGCAUCUGCAAGCCCAAUGUUGAA | 24 |
| USH2A-495 | − | GCAUCUGCAAGCCCAAUGUUGAA | 23 |
| USH2A-496 | − | CAUCUGCAAGCCCAAUGUUGAA | 22 |
| USH2A-497 | − | AUCUGCAAGCCCAAUGUUGAA | 21 |
| USH2A-498 | + | ACUGAGCCAUGGAGGUUACACUGG | 24 |
| USH2A-499 | + | CUGAGCCAUGGAGGUUACACUGG | 23 |
| USH2A-500 | + | UGAGCCAUGGAGGUUACACUGG | 22 |
| USH2A-501 | + | GAGCCAUGGAGGUUACACUGG | 21 |
| USH2A-502 | − | AAGGACUUCAGUGUGACACCUGCA | 24 |
| USH2A-503 | − | AGGACUUCAGUGUGACACCUGCA | 23 |
| USH2A-504 | − | GGACUUCAGUGUGACACCUGCA | 22 |
| USH2A-505 | − | GACUUCAGUGUGACACCUGCA | 21 |
| USH2A-506 | + | AGUGAGGAUUGCAGAAUUUGUUCA | 24 |
| USH2A-507 | + | GUGAGGAUUGCAGAAUUUGUUCA | 23 |
| USH2A-508 | + | UGAGGAUUGCAGAAUUUGUUCA | 22 |
| USH2A-509 | + | GAGGAUUGCAGAAUUUGUUCA | 21 |
| USH2A-510 | + | UAAAAUAUAUUUAAAAGGUGAGGA | 24 |
| USH2A-511 | + | AAAAUAUAUUUAAAAGGUGAGGA | 23 |
| USH2A-512 | + | AAAUAUAUUUAAAAGGUGAGGA | 22 |
| USH2A-513 | + | AAUAUAUUUAAAAGGUGAGGA | 21 |
| USH2A-514 | − | CUGUGACACAGCUGGAUCCCUCCC | 24 |
| USH2A-515 | − | UGUGACACAGCUGGAUCCCUCCC | 23 |
| USH2A-516 | − | GUGACACAGCUGGAUCCCUCCC | 22 |
| USH2A-517 | − | UGACACAGCUGGAUCCCUCCC | 21 |
| USH2A-518 | + | CUGUCUUAGCAUUACAGACAGUCC | 24 |
| USH2A-519 | + | UGUCUUAGCAUUACAGACAGUCC | 23 |
| USH2A-520 | + | GUCUUAGCAUUACAGACAGUCC | 22 |
| USH2A-521 | + | UCUUAGCAUUACAGACAGUCC | 21 |
| USH2A-522 | − | UGAACAAAUUCUGCAAUCCUCACU | 24 |
| USH2A-523 | − | GAACAAAUUCUGCAAUCCUCACU | 23 |
| USH2A-524 | − | AACAAAUUCUGCAAUCCUCACU | 22 |
| USH2A-525 | − | ACAAAUUCUGCAAUCCUCACU | 21 |
| USH2A-526 | − | CAAAGGACUUCAGUGUGACACCUG | 24 |
| USH2A-527 | − | AAAGGACUUCAGUGUGACACCUG | 23 |
| USH2A-528 | − | AAGGACUUCAGUGUGACACCUG | 22 |
| USH2A-529 | − | AGGACUUCAGUGUGACACCUG | 21 |
| USH2A-530 | − | CACCUUUUAAAUAUAUUUUAUCUU | 24 |
| USH2A-531 | − | ACCUUUUAAAUAUAUUUUAUCUU | 23 |
| USH2A-532 | − | CCUUUUAAAUAUAUUUUAUCUU | 22 |
| USH2A-533 | − | CUUUUAAAUAUAUUUUAUCUU | 21 |
| USH2A-534 | − | GUGCAUCUGCAAGCCCAAUGUUGA | 24 |
| USH2A-535 | − | UGCAUCUGCAAGCCCAAUGUUGA | 23 |
| USH2A-536 | − | GCAUCUGCAAGCCCAAUGUUGA | 22 |
| USH2A-537 | − | CAUCUGCAAGCCCAAUGUUGA | 21 |
| USH2A-538 | + | GUCUUAGCAUUACAGACAGUCCCA | 24 |
| USH2A-539 | + | UCUUAGCAUUACAGACAGUCCCA | 23 |
| USH2A-540 | + | CUUAGCAUUACAGACAGUCCCA | 22 |
| USH2A-541 | + | UUAGCAUUACAGACAGUCCCA | 21 |
| USH2A-542 | − | AGUGCAUCUGCAAGCCCAAUGUUG | 24 |
| USH2A-543 | − | GUGCAUCUGCAAGCCCAAUGUUG | 23 |
| USH2A-544 | − | UGCAUCUGCAAGCCCAAUGUUG | 22 |
| USH2A-545 | − | GCAUCUGCAAGCCCAAUGUUG | 21 |
| USH2A-546 | − | CACUCUGGGCAGUGUAGUGCAAAA | 24 |
| USH2A-547 | − | ACUCUGGGCAGUGUAGUGCAAAA | 23 |
| USH2A-548 | − | CUCUGGGCAGUGUAGUGCAAAA | 22 |
| USH2A-549 | − | UCUGGGCAGUGUAGUGCAAAA | 21 |
| USH2A-550 | + | UGUCUUAGCAUUACAGACAGUCCC | 24 |
| USH2A-551 | + | GUCUUAGCAUUACAGACAGUCCC | 23 |
| USH2A-552 | + | UCUUAGCAUUACAGACAGUCCC | 22 |
| USH2A-553 | + | CUUAGCAUUACAGACAGUCCC | 21 |
| USH2A-554 | + | CUUUUUUGCACUACACUGCCCAGA | 24 |
| USH2A-555 | + | UUUUUUGCACUACACUGCCCAGA | 23 |
| USH2A-556 | + | UUUUUGCACUACACUGCCCAGA | 22 |
| USH2A-557 | + | UUUUGCACUACACUGCCCAGA | 21 |
| USH2A-558 | − | CAGUGUAGUGCAAAAAAGAAGCCA | 24 |
| USH2A-559 | − | AGUGUAGUGCAAAAAAGAAGCCA | 23 |
| USH2A-560 | − | GUGUAGUGCAAAAAAGAAGCCA | 22 |
| USH2A-561 | − | UGUAGUGCAAAAAAGAAGCCA | 21 |
| USH2A-562 | + | AAAAUAUAUUUAAAAGGUGAGGAU | 24 |
| USH2A-563 | + | AAAUAUAUUUAAAAGGUGAGGAU | 23 |
| USH2A-564 | + | AAUAUAUUUAAAAGGUGAGGAU | 22 |
| USH2A-565 | + | AUAUAUUUAAAAGGUGAGGAU | 21 |
| USH2A-566 | − | ACUGUGACACAGCUGGAUCCCUCC | 24 |
| USH2A-567 | − | CUGUGACACAGCUGGAUCCCUCC | 23 |
| USH2A-568 | − | UGUGACACAGCUGGAUCCCUCC | 22 |
| USH2A-569 | − | GUGACACAGCUGGAUCCCUCC | 21 |
| USH2A-570 | − | UGCCAGUGUAACCUCCAUGGCUCA | 24 |
| USH2A-571 | − | GCCAGUGUAACCUCCAUGGCUCA | 23 |
| USH2A-572 | − | CCAGUGUAACCUCCAUGGCUCA | 22 |
| USH2A-573 | − | CAGUGUAACCUCCAUGGCUCA | 21 |
| USH2A-574 | − | UUGCAAUUUUGGAUUUAAAUUUCU | 24 |
| USH2A-575 | − | UGCAAUUUUGGAUUUAAAUUUCU | 23 |
| USH2A-576 | − | GCAAUUUUGGAUUUAAAUUUCU | 22 |
| USH2A-577 | − | CAAUUUUGGAUUUAAAUUUCU | 21 |
| USH2A-578 | − | GAGACAGUGCAAUAAAUGUUUGGA | 24 |
| USH2A-579 | − | AGACAGUGCAAUAAAUGUUUGGA | 23 |
| USH2A-580 | − | GACAGUGCAAUAAAUGUUUGGA | 22 |
| USH2A-581 | − | ACAGUGCAAUAAAUGUUUGGA | 21 |
| USH2A-582 | + | GGAAAAUGAUUUCAUUCAAGAUAG | 24 |
| USH2A-583 | + | GAAAAUGAUUUCAUUCAAGAUAG | 23 |
| USH2A-584 | + | AAAAUGAUUUCAUUCAAGAUAG | 22 |
| USH2A-585 | + | AAAUGAUUUCAUUCAAGAUAG | 21 |
| USH2A-586 | + | AUAAAAUAUAUUUAAAAGGUGAGG | 24 |
| USH2A-587 | + | UAAAAUAUAUUUAAAAGGUGAGG | 23 |
| USH2A-588 | + | AAAAUAUAUUUAAAAGGUGAGG | 22 |
| USH2A-589 | + | AAAUAUAUUUAAAAGGUGAGG | 21 |
| USH2A-590 | − | AAGGGAGACAGUGCAAUAAAUGUU | 24 |
| USH2A-591 | − | AGGGAGACAGUGCAAUAAAUGUU | 23 |
| USH2A-592 | − | GGGAGACAGUGCAAUAAAUGUU | 22 |
| USH2A-593 | − | GGAGACAGUGCAAUAAAUGUU | 21 |
| USH2A-594 | + | UCACAUCCAACAUCAUUAAAGCUU | 24 |
| USH2A-595 | + | CACAUCCAACAUCAUUAAAGCUU | 23 |
| USH2A-596 | + | ACAUCCAACAUCAUUAAAGCUU | 22 |
| USH2A-597 | + | CAUCCAACAUCAUUAAAGCUU | 21 |
| USH2A-598 | − | GGAGACAGUGCAAUAAAUGUUUGG | 24 |
| USH2A-599 | − | GAGACAGUGCAAUAAAUGUUUGG | 23 |
| USH2A-600 | − | AGACAGUGCAAUAAAUGUUUGG | 22 |
| USH2A-601 | − | GACAGUGCAAUAAAUGUUUGG | 21 |
| USH2A-602 | + | UUAUUGCACUGUCUCCCUUCAACA | 24 |
| USH2A-603 | + | UAUUGCACUGUCUCCCUUCAACA | 23 |
| USH2A-604 | + | AUUGCACUGUCUCCCUUCAACA | 22 |
| USH2A-605 | + | UUGCACUGUCUCCCUUCAACA | 21 |
| USH2A-606 | + | ACAUCCAACAUCAUUAAAGCUUCG | 24 |
| USH2A-607 | + | CAUCCAACAUCAUUAAAGCUUCG | 23 |
| USH2A-608 | + | AUCCAACAUCAUUAAAGCUUCG | 22 |
| USH2A-609 | + | UCCAACAUCAUUAAAGCUUCG | 21 |
| USH2A-610 | − | UCCGAAGCUUUAAUGAUGUUGGAU | 24 |
| USH2A-611 | − | CCGAAGCUUUAAUGAUGUUGGAU | 23 |
| USH2A-612 | − | CGAAGCUUUAAUGAUGUUGGAU | 22 |
| USH2A-613 | − | GAAGCUUUAAUGAUGUUGGAU | 21 |
| USH2A-614 | − | GGCAGUGCAUCUGCAAGCCCAAUG | 24 |
| USH2A-615 | − | GCAGUGCAUCUGCAAGCCCAAUG | 23 |
| USH2A-616 | − | CAGUGCAUCUGCAAGCCCAAUG | 22 |
| USH2A-617 | − | AGUGCAUCUGCAAGCCCAAUG | 21 |
| USH2A-618 | − | GGGAGACAGUGCAAUAAAUGUUUG | 24 |
| USH2A-619 | − | GGAGACAGUGCAAUAAAUGUUUG | 23 |
| USH2A-620 | − | GAGACAGUGCAAUAAAUGUUUG | 22 |
| USH2A-621 | − | AGACAGUGCAAUAAAUGUUUG | 21 |

[0711] Table 5F provides targeting domains for the 2299delG site in the USH2A gene that can be used for dual targeting. Any of the targeting domains in the table can be used with a S. aureus Cas9 (nickase) molecule to generate a single stranded break.

[0712] Exemplary nickase pairs including selecting a targeting domain from Group A and a second targeting domain from Group B. It is contemplated herein that in an embodiment a targeting domain of Group A can be combined with any of the targeting domains of Group B. For example, USH2A-288 can be combined with USH2A-448.

TABLE 5F

| Group A | Group B |
|---|---|
| USH2A-288 | USH2A-448 |

[0713] Table 6A provides targeting domains for the 2299delG site in the USH2A selected according to the first tier parameters. The targeting domains are within 200 bases of the 2299deG site, have good orthogonality, and start with G. It is contemplated herein that in an embodiment the targeting domain hybridizes to the target domain through complementary base pairing. Any of the targeting domains in the table can be used with a N. meningitidis Cas9 molecule that generates a double stranded break (Cas9 nuclease) or a single-stranded break (Cas9 nickase).

TABLE 6A

| | DNA | | Target Site |
|---|---|---|---|
| gRNA Name | Strand | Targeting Domain | Length |
| USH2A-264 | + | GUGUCACACUGAAGUCC | 17 |
| USH2A-261 | − | GGUGUGAUCAUUGCAAU | 17 |
| USH2A-270 | + | GGGCUCACAUCCAACAUCAU | 20 |

[0714] Table 6B provides targeting domains for the 2299delG site in the USH2A selected according to the second tier parameters. The targeting domains are within 200 bases of the 2299deG site and have good orthogonality. It is contemplated herein that in an embodiment the targeting domain hybridizes to the target domain through complementary base pairing. Any of the targeting domains in the table can be used with a N. meningitidis Cas9 molecule that generates a double stranded break (Cas9 nuclease) or a single-stranded break (Cas9 nickase).

TABLE 6B

| | DNA | | Target Site |
|---|---|---|---|
| gRNA Name | Strand | Targeting Domain | Length |
| USH2A-263 | + | CACUACACUGCCCAGAG | 17 |
| USH2A-266 | + | AAAAGGUGAGGAUGGGA | 17 |
| USH2A-260 | + | CUCACAUCCAACAUCAU | 17 |
| USH2A-262 | + | ACUGUCUCCCUUCAACA | 17 |
| USH2A-273 | + | CAGGUGUCACACUGAAGUCC | 20 |
| USH2A-268 | − | UUAGGUGUGAUCAUUGCAAU | 20 |
| USH2A-269 | + | UUGCACUACACUGCCCAGAG | 20 |
| USH2A-271 | + | UGCACUGUCUCCCUUCAACA | 20 |
| USH2A-274 | + | UUUAAAAGGUGAGGAUGGGA | 20 |

[0715] Table 6C provides targeting domains for the 2299delG site in the USH2A selected according to the fourth tier parameters. The targeting domains are within 200 bases of the 2299deG site. It is contemplated herein that in an embodiment the targeting domain hybridizes to the target domain through complementary base pairing. Any of the targeting domains in the table can be used with a N. meningitidis Cas9 molecule that generates a double stranded break (Cas9 nuclease) or a single-stranded break (Cas9 nickase).

TABLE 6C

| | DNA | | Target Site |
|---|---|---|---|
| gRNA Name | Strand | Targeting Domain | Length |
| USH2A-267 | − | UAAAUAUAUUUUAUCUU | 17 |
| USH2A-265 | − | UUGGAUUUAAAUUUCUC | 17 |
| USH2A-272 | − | UUUUAAAUAUAUUUUAUCUU | 20 |
| USH2A-275 | − | AUUUUGGAUUUAAAUUUCUC | 20 |

[0716] Table 6D provides targeting domains for the 2299delG site in the USH2A gene that can be used for dual targeting. Any of the targeting domains in the table can be used with a N. meningitidis Cas9 (nickase) molecule to generate a single stranded break.

[0717] Exemplary nickase pairs including selecting a targeting domain from Group A and a second targeting domain from Group B. It is contemplated herein that in an embodiment a targeting domain of Group A can be combined with any of the targeting domains of Group B. For example, USH2A-266 can be combined with USH2A-261 or USH2A-268 can be combined with USH2A-261.

TABLE 6D

| Group A | Group B |
|---|---|
| USH2A-266 | USH2A-261 |
| USH2A-268 | |

### III. Cas9 Molecules

[0718] Cas9 molecules of a variety of species can be used in the methods and compositions described herein. While the S. pyogenes, S. aureus, and S. thermophilus Cas9 molecules are the subject of much of the disclosure herein, Cas9 molecules of, derived from, or based on the Cas9 proteins of other species lised herein can be used as well. In other words, while much of the description herein uses S. pyogenes and S. thermophilus Cas9 molecules Cas9 molecules from the other species can replace them. Such species include: Acidovorax avenae, Actinobacillus pleuropneumoniae, Actinobacillus succinogenes, Actinobacillus suis, Actinomyces sp., Cycliphilus denitrificans, Aminomonas paucivorans, Bacillus cereus, Bacillus smithii, Bacillus thuringiensis, Bacteroides sp., Blastopirellula marina, Bradyrhizobium sp., Brevibacillus laterosporus, Campylobacter coli, Campylobacter jejuni, Campylobacter lari, Candidatus puniceispirillum, Clostridium cellulolyticum, Clostridium perfringens, Corynebacterium accolens, Corynebacterium diphtheria, Corynebacterium matruchotii, Dinoroseobacter shibae, Eubacterium dolichum, gamma proteobacterium, Gluconacetobacter diazotrophicus, Haemophilus parainfluenzae, Haemophilus sputorum, Helicobacter canadensis, Helicobacter cinaedi, Helicobacter mustelae, Ilyobacter polytropus, Kingella kingae, Lactobacillus crispatus, Listeria ivanovii, Listeria monocytogenes, Listeriaceae bacterium, Methylocystis sp., Methylosinus trichosporium, Mobiluncus mulieris, Neisseria bacilliformis, Neisseria cinerea, Neisseria flavescens, Neisseria lactamica, Neisseria meningitides, Neisseria sp., Neisseria wadsworthii, Nitrosomonas sp., Parvibaculum lavamentivorans, Pasteurella multocida, Phascolarctobacterium succinatutens, Ralstonia syzygii, Rhodopseudomonas palustris, Rhodovulum sp., Simonsiella muelleri, Sphingomonas sp., Sporolactobacillus vineae, Staphylococcus aureus, Staphylococcus lugdunensis, Streptococcus sp., Subdoligranulum sp., Tistrella mobilis, Treponema sp., or Verminephrobacter eiseniae.

[0719] A Cas9 molecule, or Cas9 polypeptide, as that term is used herein, refers to a molecule or polypeptide that can interact with a guide RNA (gRNA) molecule and, in concert with the gRNA molecule, home or localizes to a site which comprises a target domain and PAM sequence. Cas9 molecule and Cas9 polypeptide, as those terms are used herein, refer to naturally occurring Cas9 molecules and to engineered, altered, or modified Cas9 molecules or Cas9 polypeptides that differ, e.g., by at least one amino acid residue, from a reference sequence, e.g., the most similar naturally occurring Cas9 molecule or a sequence of Table 7.

[0720] Cas9 Domains

[0721] Crystal structures have been determined for two different naturally occurring bacterial Cas9 molecules (Jinek et al., Science, 343(6176):1247997, 2014) and for S. pyogenes Cas9 with a guide RNA (e.g., a synthetic fusion of crRNA and tracrRNA) (Nishimasu et al., Cell, 156:935-949, 2014; and Anders et al., Nature, 2014, doi: 10.1038/nature13579).

[0722] A naturally occurring Cas9 molecule comprises two lobes: a recognition (REC) lobe and a nuclease (NUC) lobe; each of which further comprises domains described herein. FIGS. 9A-9B provide a schematic of the organization of important Cas9 domains in the primary structure. The domain nomenclature and the numbering of the amino acid residues encompassed by each domain used throughout this disclosure is as described in Nishimasu et al. The numbering of the amino acid residues is with reference to Cas9 from S. pyogenes.

[0723] The REC lobe comprises the arginine-rich bridge helix (BH), the REC1 domain, and the REC2 domain. The REC lobe does not share structural similarity with other known proteins, indicating that it is a Cas9-specific functional domain. The BH domain is a long a helix and arginine rich region and comprises amino acids 60-93 of the sequence of S. pyogenes Cas9. The REC1 domain is important for recognition of the repeat:anti-repeat duplex, e.g., of a gRNA or a tracrRNA, and is therefore critical for Cas9 activity by recognizing the target sequence. The REC1 domain comprises two REC1 motifs at amino acids 94 to 179 and 308 to 717 of the sequence of S. pyogenes Cas9. These two REC1 domains, though separated by the REC2 domain in the linear primary structure, assemble in the tertiary structure to form the REC1 domain. The REC2 domain, or parts thereof, may also play a role in the recognition of the repeat:anti-repeat duplex. The REC2 domain comprises amino acids 180-307 of the sequence of S. pyogenes Cas9.

[0724] The NUC lobe comprises the RuvC domain (also referred to herein as RuvC-like domain), the HNH domain (also referred to herein as HNH-like domain), and the PAM-interacting (PI) domain. The RuvC domain shares structural similarity to retroviral integrase superfamily members and cleaves a single strand, e.g., the non-complementary strand of the target nucleic acid molecule. The RuvC domain is assembled from the three split RuvC motifs (RuvC I, RuvCII, and RuvCIII, which are often commonly referred to in the art as RuvCI domain, or N-terminal RuvC domain, RuvCII domain, and RuvCIII domain) at amino acids 1-59, 718-769, and 909-1098, respectively, of the sequence of S. pyogenes Cas9. Similar to the REC1 domain, the three RuvC motifs are linearly separated by other domains in the primary structure, however in the tertiary structure, the three RuvC motifs assemble and form the RuvC domain. The HNH domain shares structural similarity with HNH endonucleases, and cleaves a single strand, e.g., the complementary strand of the target nucleic acid molecule. The HNH domain lies between the RuvC II-III motifs and comprises amino acids 775-908 of the sequence of S. pyogenes Cas9. The PI domain interacts with the PAM of the target nucleic acid molecule, and comprises amino acids 1099-1368 of the sequence of S. pyogenes Cas9.

[0725] A RuvC-Like Domain and an HNH-Like Domain

[0726] In an embodiment, a Cas9 molecule or Cas9 polypeptide comprises an HNH-like domain and a RuvC-like domain. In an embodiment, cleavage activity is dependent on a RuvC-like domain and an HNH-like domain. A Cas9 molecule or Cas9 polypeptide, e.g., an eaCas9 molecule or eaCas9 polypeptide, can comprise one or more of the following domains: a RuvC-like domain and an HNH-like domain. In an embodiment, a Cas9 molecule or Cas9 polypeptide is an eaCas9 molecule or eaCas9 polypeptide and the eaCas9 molecule or eaCas9 polypeptide comprises a RuvC-like domain, e.g., a RuvC-like domain described below, and/or an HNH-like domain, e.g., an HNH-like domain described below.

[0727] RuvC-Like Domains

[0728] In an embodiment, a RuvC-like domain cleaves, a single strand, e.g., the non-complementary strand of the target nucleic acid molecule. The Cas9 molecule or Cas9 polypeptide can include more than one RuvC-like domain (e.g., one, two, three or more RuvC-like domains). In an embodiment, a RuvC-like domain is at least 5, 6, 7, 8 amino acids in length but not more than 20, 19, 18, 17, 16 or 15 amino acids in length. In an embodiment, the Cas9 molecule or Cas9 polypeptide comprises an N-terminal RuvC-like domain of about 10 to 20 amino acids, e.g., about 15 amino acids in length.

[0729] N-Terminal RuvC-Like Domains

[0730] Some naturally occurring Cas9 molecules comprise more than one RuvC-like domain with cleavage being dependent on the N-terminal RuvC-like domain. Accordingly, Cas9 molecules or Cas9 polypeptide can comprise an N-terminal RuvC-like domain. Exemplary N-terminal RuvC-like domains are described below.

[0731] In an embodiment, an eaCas9 molecule or eaCas9 polypeptide comprises an N-terminal RuvC-like domain comprising an amino acid sequence of formula I:

D-X1-G-X2-X3-X4-X5-G-X6-X7-X8-X9 (SEQ ID NO: 8),

[0732] wherein,

[0733] X1 is selected from I, V, M, L and T (e.g., selected from I, V, and L);

[0734] X2 is selected from T, I, V, S, N, Y, E and L (e.g., selected from T, V, and I);

[0735] X3 is selected from N, S, G, A, D, T, R, M and F (e.g., A or N);

[0736] X4 is selected from S, Y, N and F (e.g., S);

[0737] X5 is selected from V, I, L, C, T and F (e.g., selected from V, I and L);

[0738] X6 is selected from W, F, V, Y, S and L (e.g., W);

[0739] X7 is selected from A, S, C, V and G (e.g., selected from A and S);

[0740] X8 is selected from V, I, L, A, M and H (e.g., selected from V, I, M and L); and

[0741] X9 is selected from any amino acid or is absent, designated by Δ (e.g., selected from T, V, I, L, Δ, F, S, A, Y, M and R, or, e.g., selected from T, V, I, L and Δ).

[0742] In an embodiment, the N-terminal RuvC-like domain differs from a sequence of SEQ ID NO:8, by as many as 1 but no more than 2, 3, 4, or 5 residues.

[0743] In embodiment, the N-terminal RuvC-like domain is cleavage competent.

[0744] In embodiment, the N-terminal RuvC-like domain is cleavage incompetent.

[0745] In an embodiment, a eaCas9 molecule or eaCas9 polypeptide comprises an N-terminal RuvC-like domain comprising an amino acid sequence of formula II:

D-X1-G-X2-X3-S-X5-G-X6-X7-X8-X9, (SEQ ID NO: 9),

[0746] wherein

[0747] X1 is selected from I, V, M, L and T (e.g., selected from I, V, and L);

[0748] X2 is selected from T, I, V, S, N, Y, E and L (e.g., selected from T, V, and I);

[0749] X3 is selected from N, S, G, A, D, T, R, M and F (e.g., A or N);

[0750] X5 is selected from V, I, L, C, T and F (e.g., selected from V, I and L);

[0751] X6 is selected from W, F, V, Y, S and L (e.g., W);

[0752] X7 is selected from A, S, C, V and G (e.g., selected from A and S);

[0753] X8 is selected from V, I, L, A, M and H (e.g., selected from V, I, M and L); and

[0754] X9 is selected from any amino acid or is absent (e.g., selected from T, V, I, L, A, F, S, A, Y, M and R or selected from e.g., T, V, I, L and A).

[0755] In an embodiment, the N-terminal RuvC-like domain differs from a sequence of SEQ ID NO:9 by as many as 1 but no more than 2, 3, 4, or 5 residues.

[0756] In an embodiment, the N-terminal RuvC-like domain comprises an amino acid sequence of formula III:

D-I-G-X2-X3-S-V-G-W-A-X8-X9 (SEQ ID NO: 10),

[0757] wherein

[0758] X2 is selected from T, I, V, S, N, Y, E and L (e.g., selected from T, V, and I);

[0759] X3 is selected from N, S, G, A, D, T, R, M and F (e.g., A or N);

[0760] X8 is selected from V, I, L, A, M and H (e.g., selected from V, I, M and L); and

[0761] X9 is selected from any amino acid or is absent (e.g., selected from T, V, I, L, Δ, F, S, A, Y, M and R or selected from e.g., T, V, I, L and Δ).

[0762] In an embodiment, the N-terminal RuvC-like domain differs from a sequence of SEQ ID NO:10 by as many as 1 but no more than, 2, 3, 4, or 5 residues.

[0763] In an embodiment, the N-terminal RuvC-like domain comprises an amino acid sequence of formula III:

D-I-G-T-N-S-V-G-W-A-V-X (SEQ ID NO: 11),

[0764] wherein

[0765] X is a non-polar alkyl amino acid or a hydroxyl amino acid, e.g., X is selected from V, I, L and T (e.g., the eaCas9 molecule can comprise an N-terminal RuvC-like domain shown in FIGS. 2A-2G (is depicted as Y)).

[0766] In an embodiment, the N-terminal RuvC-like domain differs from a sequence of SEQ ID NO:11 by as many as 1 but no more than, 2, 3, 4, or 5 residues.

[0767] In an embodiment, the N-terminal RuvC-like domain differs from a sequence of an N-terminal RuvC like domain disclosed herein, e.g., in FIGS. 3A-3B or FIGS. 7A-7B, as many as 1 but no more than 2, 3, 4, or 5 residues. In an embodiment, 1, 2, 3 or all of the highly conserved residues identified in FIGS. 3A-3B or FIGS. 7A-7B are present.

[0768] In an embodiment, the N-terminal RuvC-like domain differs from a sequence of an N-terminal RuvC-like domain disclosed herein, e.g., in FIGS. 4A-4B or FIGS. 7A-7B, as many as 1 but no more than 2, 3, 4, or 5 residues. In an embodiment, 1, 2, or all of the highly conserved residues identified in FIGS. 4A-4B or FIGS. 7A-7B are present.

[0769] Additional RuvC-Like Domains

[0770] In addition to the N-terminal RuvC-like domain, the Cas9 molecule or Cas9 polypeptide, e.g., an eaCas9 molecule or eaCas9 polypeptide, can comprise one or more additional RuvC-like domains. In an embodiment, the Cas9 molecule or Cas9 polypeptide can comprise two additional RuvC-like domains. Preferably, the additional RuvC-like domain is at least 5 amino acids in length and, e.g., less than 15 amino acids in length, e.g., 5 to 10 amino acids in length, e.g., 8 amino acids in length.

[0771] An additional RuvC-like domain can comprise an amino acid sequence:

I-X1-X2-E-X3-A-R-E (SEQ ID NO:12), wherein

[0772] X1 is V or H,

[0773] X2 is I, L or V (e.g., I or V); and

[0774] X3 is M or T.

[0775] In an embodiment, the additional RuvC-like domain comprises the amino acid sequence:

I-V-X2-E-M-A-R-E (SEQ ID NO:13), wherein

[0776] X2 is I, L or V (e.g., I or V) (e.g., the eaCas9 molecule or eaCas9 polypeptide can comprise an additional RuvC-like domain shown in FIG. 2A-2G or FIGS. 7A-7B (depicted as B)). An additional RuvC-like domain can comprise an amino acid sequence:

H-H-A-XI-D-A-X2-X3 (SEQ ID NO:14), wherein

[0777] X1 is H or L;

[0778] X2 is R or V; and

[0779] X3 is E or V.

[0780] In an embodiment, the additional RuvC-like domain comprises the amino acid sequence:

H-H-A-H-D-A-Y-L (SEQ ID NO:15).

[0781] In an embodiment, the additional RuvC-like domain differs from a sequence of SEQ ID NO:13, 15, 12 or 14 by as many as 1 but no more than 2, 3, 4, or 5 residues.

[0782] In some embodiments, the sequence flanking the N-terminal RuvC-like domain is a sequences of formula V:

K-X1′-Y-X2′-X3′-X4′-Z-T-D-X9′-Y, (SEQ ID NO:16).

[0783] wherein

[0784] X1′ is selected from K and P,

[0785] X2′ is selected from V, L, I, and F (e.g., V, I and L);

[0786] X3′ is selected from G, A and S (e.g., G),

[0787] X4′ is selected from L, I, V and F (e.g., L);

[0788] X9′ is selected from D, E, N and Q; and

[0789] Z is an N-terminal RuvC-like domain, e.g., as described above.

[0790] HNH-Like Domains

[0791] In an embodiment, an HNH-like domain cleaves a single stranded complementary domain, e.g., a complementary strand of a double stranded nucleic acid molecule. In an embodiment, an HNH-like domain is at least 15, 20, 25 amino acids in length but not more than 40, 35 or 30 amino acids in length, e.g., 20 to 35 amino acids in length, e.g., 25 to 30 amino acids in length. Exemplary HNH-like domains are described below.

[0792] In an embodiment, an eaCas9 molecule or eaCas9 polypeptide comprises an HNH-like domain having an amino acid sequence of formula VI:

X1-X2-X3-H-X4-X5-P-X6-X7-X8-X9-X10-X11-X12-X13-X14-X15-N-X16-X17-X18-X19-X20-X21-X22-X23-N (SEQ ID NO:17), wherein

[0793] X1 is selected from D, E, Q and N (e.g., D and E);

[0794] X2 is selected from L, I, R, Q, V, M and K;

[0795] X3 is selected from D and E;

[0796] X4 is selected from I, V, T, A and L (e.g., A, I and V);

[0797] X5 is selected from V, Y, I, L, F and W (e.g., V, I and L);

[0798] X6 is selected from Q, H, R, K, Y, I, L, F and W;

[0799] X7 is selected from S, A, D, T and K (e.g., S and A);

[0800] X8 is selected from F, L, V, K, Y, M, I, R, A, E, D and Q (e.g., F);

[0801] X9 is selected from L, R, T, I, V, S, C, Y, K, F and G;

[0802] X10 is selected from K, Q, Y, T, F, L, W, M, A, E, G, and S;

[0803] X11 is selected from D, S, N, R, L and T (e.g., D);

[0804] X12 is selected from D, N and S;

[0805] X13 is selected from S, A, T, G and R (e.g., S);

[0806] X14 is selected from I, L, F, S, R, Y, Q, W, D, K and H (e.g., I, L and F);

[0807] X15 is selected from D, S, I, N, E, A, H, F, L, Q, M, G, Y and V;

[0808] X16 is selected from K, L, R, M, T and F (e.g., L, R and K);

[0809] X17 is selected from V, L, I, A and T;

[0810] X18 is selected from L, I, V and A (e.g., L and I);

[0811] X19 is selected from T, V, C, E, S and A (e.g., T and V);

[0812] X20 is selected from R, F, T, W, E, L, N, C, K, V, S, Q, I, Y, H and A;

[0813] X21 is selected from S, P, R, K, N, A, H, Q, G and L;

[0814] X22 is selected from D, G, T, N, S, K, A, I, E, L, Q, R and Y; and

[0815] X23 is selected from K, V, A, E, Y, I, C, L, S, T, G, K, M, D and F.

[0816] In an embodiment, a HNH-like domain differs from a sequence of SEQ ID NO:17 by at least one but no more than, 2, 3, 4, or 5 residues.

[0817] In an embodiment, the HNH-like domain is cleavage competent.

[0818] In an embodiment, the HNH-like domain is cleavage incompetent.

[0819] In an embodiment, an eaCas9 molecule or eaCas9 polypeptide comprises an HNH-like domain comprising an amino acid sequence of formula VII:

X1-X2-X3-H-X4-X5-P-X6-S-X8-X9-X10-D-D-S-X14-X15-N-K-V-L-X19-X20-X21-X22-X23-N (SEQ ID NO:18),

[0820] wherein

[0821] X1 is selected from D and E;

[0822] X2 is selected from L, I, R, Q, V, M and K;

[0823] X3 is selected from D and E;

[0824] X4 is selected from I, V, T, A and L (e.g., A, I and V);

[0825] X5 is selected from V, Y, I, L, F and W (e.g., V, I and L);

[0826] X6 is selected from Q, H, R, K, Y, I, L, F and W;

[0827] X8 is selected from F, L, V, K, Y, M, I, R, A, E, D and Q (e.g., F);

[0828] X9 is selected from L, R, T, I, V, S, C, Y, K, F and G;

[0829] X10 is selected from K, Q, Y, T, F, L, W, M, A, E, G, and S;

[0830] X14 is selected from I, L, F, S, R, Y, Q, W, D, K and H (e.g., I, L and F);

[0831] X15 is selected from D, S, I, N, E, A, H, F, L, Q, M, G, Y and V;

[0832] X19 is selected from T, V, C, E, S and A (e.g., T and V);

[0833] X20 is selected from R, F, T, W, E, L, N, C, K, V, S, Q, I, Y, H and A;

[0834] X21 is selected from S, P, R, K, N, A, H, Q, G and L;

[0835] X22 is selected from D, G, T, N, S, K, A, I, E, L, Q, R and Y; and

[0836] X23 is selected from K, V, A, E, Y, I, C, L, S, T, G, K, M, D and F.

[0837] In an embodiment, the HNH-like domain differs from a sequence of SEQ ID NO:18 by 1, 2, 3, 4, or 5 residues.

[0838] In an embodiment, an eaCas9 molecule or eaCas9 polypeptide comprises an HNH-like domain comprising an amino acid sequence of formula VII:

X1-V-X3-H-I-V-P-X6-S-X8-X9-X10-D-D-S-X14-X15-N-K-V-L-T-X20-X21-X22-X23-N (SEQ ID NO:19),

[0839] wherein

[0840] X1 is selected from D and E;

[0841] X3 is selected from D and E;

[0842] X6 is selected from Q, H, R, K, Y, I, L and W;

[0843] X8 is selected from F, L, V, K, Y, M, I, R, A, E, D and Q (e.g., F);

[0844] X9 is selected from L, R, T, I, V, S, C, Y, K, F and G;

[0845] X10 is selected from K, Q, Y, T, F, L, W, M, A, E, G, and S;

[0846] X14 is selected from I, L, F, S, R, Y, Q, W, D, K and H (e.g., I, L and F);

[0847] X15 is selected from D, S, I, N, E, A, H, F, L, Q, M, G, Y and V;

[0848] X20 is selected from R, F, T, W, E, L, N, C, K, V, S, Q, I, Y, H and A;

[0849] X21 is selected from S, P, R, K, N, A, H, Q, G and L;

[0850] X22 is selected from D, G, T, N, S, K, A, I, E, L, Q, R and Y; and

[0851] X23 is selected from K, V, A, E, Y, I, C, L, S, T, G, K, M, D and F.

[0852] In an embodiment, the HNH-like domain differs from a sequence of SEQ ID NO:19 by 1, 2, 3, 4, or 5 residues.

[0853] In an embodiment, an eaCas9 molecule or eaCas9 polypeptide comprises an HNH-like domain having an amino acid sequence of formula VIII:

D-X2-D-H-I-X5-P-Q-X7-F-X9-X10-D-X12-S-I-D-N-X16-V-L-X19-X20-S-X22-X23-N (SEQ ID NO:20),

[0854] wherein

[0855] X2 is selected from I and V;

[0856] X5 is selected from I and V;

[0857] X7 is selected from A and S;

[0858] X9 is selected from I and L;

[0859] X10 is selected from K and T;

[0860] X12 is selected from D and N;

[0861] X16 is selected from R, K and L; X19 is selected from T and V;

[0862] X20 is selected from S and R;

[0863] X22 is selected from K, D and A; and

[0864] X23 is selected from E, K, G and N (e.g., the eaCas9 molecule or eaCas9 polypeptide can comprise an HNH-like domain as described herein).

[0865] In an embodiment, the HNH-like domain differs from a sequence of SEQ ID NO:20 by as many as 1 but no more than 2, 3, 4, or 5 residues.

[0866] In an embodiment, an eaCas9 molecule or eaCas9 polypeptide comprises the amino acid sequence of formula IX:

L-Y-Y-L-Q-N-G-X1′-D-M-Y-X2′-X3′-X4′-X5′-L-D-I-X6′-X7′-L-S-X8′-Y-Z-N-R-X9′-K-X10′-D-X11′-V-P (SEQ ID NO:21),

[0867] wherein

[0868] X1′ is selected from K and R;

[0869] X2′ is selected from V and T;

[0870] X3′ is selected from G and D;

[0871] X4′ is selected from E, Q and D;

[0872] X5′ is selected from E and D;

[0873] X6′ is selected from D, N and H;

[0874] X7′ is selected from Y, R and N;

[0875] X8′ is selected from Q, D and N; X9′ is selected from G and E;

[0876] X10′ is selected from S and G;

[0877] X11′ is selected from D and N; and

[0878] Z is an HNH-like domain, e.g., as described above.

[0879] In an embodiment, the eaCas9 molecule or eaCas9 polypeptide comprises an amino acid sequence that differs from a sequence of SEQ ID NO:21 by as many as 1 but no more than 2, 3, 4, or 5 residues.

[0880] In an embodiment, the HNH-like domain differs from a sequence of an HNH-like domain disclosed herein, e.g., in FIGS. 5A-5C or FIGS. 7A-7B, as many as 1 but no more than 2, 3, 4, or 5 residues. In an embodiment, 1 or both of the highly conserved residues identified in FIGS. 5A-5C or FIGS. 7A-7B are present.

[0881] In an embodiment, the HNH-like domain differs from a sequence of an HNH-like domain disclosed herein, e.g., in FIGS. 6A-6B or FIGS. 7A-7B, as many as 1 but no more than 2, 3, 4, or 5 residues. In an embodiment, 1, 2, all 3 of the highly conserved residues identified in FIGS. 6A-6B or FIGS. 7A-7B are present.

[0882] Cas9 Activities

[0883] Nuclease and Helicase Activities

[0884] In an embodiment, the Cas9 molecule or Cas9 polypeptide is capable of cleaving a target nucleic acid molecule. Typically wild type Cas9 molecules cleave both strands of a target nucleic acid molecule. Cas9 molecules and Cas9 polypeptides can be engineered to alter nuclease cleavage (or other properties), e.g., to provide a Cas9 molecule or Cas9 peolypeptide which is a nickase, or which lacks the ability to cleave target nucleic acid. A Cas9 molecule or Cas9 polypeptide that is capable of cleaving a target nucleic acid molecule is referred to herein as an eaCas9 molecule or eaCas9 polypeptide. In an embodiment, an eaCas9 molecule or Cas9 polypeptide comprises one or more of the following activities:

[0885] a nickase activity, i.e., the ability to cleave a single strand, e.g., the non-complementary strand or the complementary strand, of a nucleic acid molecule;

[0886] a double stranded nuclease activity, i.e., the ability to cleave both strands of a double stranded nucleic acid and create a double stranded break, which in a embodiment is the presence of two nickase activities;

[0887] an endonuclease activity;

[0888] an exonuclease activity; and

[0889] a helicase activity, i.e., the ability to unwind the helical structure of a double stranded nucleic acid.

[0890] In an embodiment, an enzymatically active Cas9 or eaCas9 molecule or eaCas9 polypeptide cleaves both strands and results in a double stranded break. In an embodiment, an eaCas9 molecule cleaves only one strand, e.g., the strand to which the gRNA hybridizes to, or the strand complementary to the strand the gRNA hybridizes with. In an embodiment, an eaCas9 molecule or eaCas9 polypeptide comprises cleavage activity associated with an HNH-like domain. In an embodiment, an eaCas9 molecule or eaCas9 polypeptide comprises cleavage activity associated with an N-terminal RuvC-like domain. In an embodiment, an eaCas9 molecule or eaCas9 polypeptide comprises cleavage activity associated with an HNH-like domain and cleavage activity associated with an N-terminal RuvC-like domain. In an embodiment, an eaCas9 molecule or eaCas9 polypeptide comprises an active, or cleavage competent, HNH-like domain and an inactive, or cleavage incompetent, N-terminal RuvC-like domain. In an embodiment, an eaCas9 molecule or eaCas9 polypeptide comprises an inactive, or cleavage incompetent, HNH-like domain and an active, or cleavage competent, N-terminal RuvC-like domain.

[0891] Some Cas9 molecules or Cas9 polypeptides have the ability to interact with a gRNA molecule, and in conjunction with the gRNA molecule localize to a core target domain, but are incapable of cleaving the target nucleic acid, or incapable of cleaving at efficient rates. Cas9 molecules having no, or no substantial, cleavage activity are referred to herein as an eiCas9 molecule or eiCas9 polypeptide. For example, an eiCas9 molecule or eiCas9 polypeptide can lack cleavage activity or have substantially less, e.g., less than 20, 10, 5, 1 or 0.1% of the cleavage activity of a reference Cas9 molecule or eiCas9 polypeptide, as measured by an assay described herein.

[0892] Targeting and PAMs

[0893] A Cas9 molecule or Cas9 polypeptide, is a polypeptide that can interact with a guide RNA (gRNA) molecule and, in concert with the gRNA molecule, localizes to a site which comprises a target domain and PAM sequence.

[0894] In an embodiment, the ability of an eaCas9 molecule or eaCas9 polypeptide to interact with and cleave a target nucleic acid is PAM sequence dependent. A PAM sequence is a sequence in the target nucleic acid. In an embodiment, cleavage of the target nucleic acid occurs upstream from the PAM sequence. eaCas9 molecules from different bacterial species can recognize different sequence motifs (e.g., PAM sequences). In an embodiment, an eaCas9 molecule of S. pyogenes recognizes the sequence motif NGG and directs cleavage of a target nucleic acid sequence 1 to 10, e.g., 3 to 5, base pairs upstream from that sequence. See, e.g., Mali et al., SCIENCE 2013; 339(6121): 823-826. In an embodiment, an eaCas9 molecule of S. thermophilus recognizes the sequence motif NGGNG and NNAGAAW (W=A or T) and directs cleavage of a core target nucleic acid sequence 1 to 10, e.g., 3 to 5, base pairs upstream from these sequences. See, e.g., Horvath et al., SCIENCE 2010; 327(5962):167-170, and Deveau et al., J BACTERIOL 2008; 190(4): 1390-1400. In an embodiment, an eaCas9 molecule of S. mutans recognizes the sequence motif NGG and/or NAAR (R=A or G) and directs cleavage of a core target nucleic acid sequence 1 to 10, e.g., 3 to 5 base pairs, upstream from this sequence. See, e.g., Deveau et al., J BACTERIOL 2008; 190(4): 1390-1400. In an embodiment, an eaCas9 molecule of S. aureus recognizes the sequence motif NNGRR (R=A or G) and directs cleavage of a target nucleic acid sequence 1 to 10, e.g., 3 to 5, base pairs upstream from that sequence. In an embodiment, an eaCas9 molecule of S. aureus recognizes the sequence motif NNGRRN (R=A or G) and directs cleavage of a target nucleic acid sequence 1 to 10, e.g., 3 to 5, base pairs upstream from that sequence. In an embodiment, an eaCas9 molecule of S. aureus recognizes the sequence motif NNGRRT (R=A or G) and directs cleavage of a target nucleic acid sequence 1 to 10, e.g., 3 to 5, base pairs upstream from that sequence. In an embodiment, an eaCas9 molecule of S. aureus recognizes the sequence motif NNGRRV (R=A or G, V=A, G or C) and directs cleavage of a target nucleic acid sequence 1 to 10, e.g., 3 to 5, base pairs upstream from that sequence. In an embodiment, an eaCas9 molecule of Neisseria meningitidis recognizes the sequence motif NNNNGATT or NNNGCTT and directs cleavage of a target nucleic acid sequence 1 to 10, e.g., 3 to 5, base pairs upstream from that sequence. See, e.g., Hou et al., PNAS Early Edition 2013, 1-6. The ability of a Cas9 molecule to recognize a PAM sequence can be determined, e.g., using a transformation assay described in Jinek et al., SCIENCE 2012 337:816. In the aforementioned embodiments, N can be any nucleotide residue, e.g., any of A, G, C or T.

[0895] As is discussed herein, Cas9 molecules can be engineered to alter the PAM specificity of the Cas9 molecule.

[0896] Exemplary naturally occurring Cas9 molecules are described in Chylinski et al., RNA BIOLOGY 2013 10:5, 727-737. Such Cas9 molecules include Cas9 molecules of a cluster 1 bacterial family, cluster 2 bacterial family, cluster 3 bacterial family, cluster 4 bacterial family, cluster 5 bacterial family, cluster 6 bacterial family, a cluster 7 bacterial family, a cluster 8 bacterial family, a cluster 9 bacterial family, a cluster 10 bacterial family, a cluster 11 bacterial family, a cluster 12 bacterial family, a cluster 13 bacterial family, a cluster 14 bacterial family, a cluster 15 bacterial family, a cluster 16 bacterial family, a cluster 17 bacterial family, a cluster 18 bacterial family, a cluster 19 bacterial family, a cluster 20 bacterial family, a cluster 21 bacterial family, a cluster 22 bacterial family, a cluster 23 bacterial family, a cluster 24 bacterial family, a cluster 25 bacterial family, a cluster 26 bacterial family, a cluster 27 bacterial family, a cluster 28 bacterial family, a cluster 29 bacterial family, a cluster 30 bacterial family, a cluster 31 bacterial family, a cluster 32 bacterial family, a cluster 33 bacterial family, a cluster 34 bacterial family, a cluster 35 bacterial family, a cluster 36 bacterial family, a cluster 37 bacterial family, a cluster 38 bacterial family, a cluster 39 bacterial family, a cluster 40 bacterial family, a cluster 41 bacterial family, a cluster 42 bacterial family, a cluster 43 bacterial family, a cluster 44 bacterial family, a cluster 45 bacterial family, a cluster 46 bacterial family, a cluster 47 bacterial family, a cluster 48 bacterial family, a cluster 49 bacterial family, a cluster 50 bacterial family, a cluster 51 bacterial family, a cluster 52 bacterial family, a cluster 53 bacterial family, a cluster 54 bacterial family, a cluster 55 bacterial family, a cluster 56 bacterial family, a cluster 57 bacterial family, a cluster 58 bacterial family, a cluster 59 bacterial family, a cluster 60 bacterial family, a cluster 61 bacterial family, a cluster 62 bacterial family, a cluster 63 bacterial family, a cluster 64 bacterial family, a cluster 65 bacterial family, a cluster 66 bacterial family, a cluster 67 bacterial family, a cluster 68 bacterial family, a cluster 69 bacterial family, a cluster 70 bacterial family, a cluster 71 bacterial family, a cluster 72 bacterial family, a cluster 73 bacterial family, a cluster 74 bacterial family, a cluster 75 bacterial family, a cluster 76 bacterial family, a cluster 77 bacterial family, or a cluster 78 bacterial family.

[0897] Exemplary naturally occurring Cas9 molecules include a Cas9 molecule of a cluster 1 bacterial family. Examples include a Cas9 molecule of: S. pyogenes (e.g., strain SF370, MGAS10270, MGAS10750, MGAS2096, MGAS315, MGAS5005, MGAS6180, MGAS9429, NZ131 and SSI-1), S. thermophilus (e.g., strain LMD-9), S. pseudoporcinus (e.g., strain SPIN 20026), S. mutans (e.g., strain UA159, NN2025), S. macacae (e.g., strain NCTC11558), S. gallolyticus (e.g., strain UCN34, ATCC BAA-2069), S. equines (e.g., strain ATCC 9812, MGCS 124), S. dysdalactiae (e.g., strain GGS 124), S. bovis (e.g., strain ATCC 700338), S. anginosus (e.g., strain F0211), S. agalactiae (e.g., strain NEM316, A909), Listeria monocytogenes (e.g., strain F6854), Listeria innocua (L. innocua, e.g., strain Clip11262), Enterococcus italicus (e.g., strain DSM 15952), or Enterococcus faecium (e.g., strain 1,231,408). Another exemplary Cas9 molecule is a Cas9 molecule of Neisseria meningitides (Hou et al., PNAS Early Edition 2013, 1-6.

[0898] In an embodiment, a Cas9 molecule or Cas9 polypeptide, e.g., an eaCas9 molecule or eaCas9 polypeptide, comprises an amino acid sequence:

[0899] having 60%, 65%, 70%, 75%, 80%, 85%, 90%, 95%, 96%, 97%, 98% or 99% homology with;

[0900] differs at no more than, 2, 5, 10, 15, 20, 30, or 40% of the amino acid residues when compared with;

[0901] differs by at least 1, 2, 5, 10 or 20 amino acids but by no more than 100, 80, 70, 60, 50, 40 or 30 amino acids from; or

[0902] is identical to any Cas9 molecule sequence described herein, or a naturally occurring Cas9 molecule sequence, e.g., a Cas9 molecule from a species listed herein or described in Chylinski et al., RNA BIOLOGY 2013 10:5, 727-737; Hou et al., PNAS Early Edition 2013, 1-6; e.g., SEQ ID NOs:1-4. In an embodiment, the Cas9 molecule or Cas9 polypeptide comprises one or more of the following activities: a nickase activity; a double stranded cleavage activity (e.g., an endonuclease and/or exonuclease activity); a helicase activity; or the ability, together with a gRNA molecule, to home to a target nucleic acid.

[0903] In an embodiment, a Cas9 molecule or Cas9 polypeptide comprises any of the amino acid sequence of the consensus sequence of FIGS. 2A-2G, wherein “*” indicates any amino acid found in the corresponding position in the amino acid sequence of a Cas9 molecule of S. pyogenes, S. thermophilus, S. mutans and L. innocua, and “-” indicates any amino acid. In an embodiment a Cas9 molecule or Cas9 polypeptide differs from the sequence of the consensus sequence disclosed in FIGS. 2A-2G by at least 1, but no more than 2, 3, 4, 5, 6, 7, 8, 9, or 10 amino acid residues. In an embodiment, a Cas9 molecule or Cas9 polypeptide comprises the amino acid sequence of SEQ ID NO:7 of FIGS. 7A-7B, wherein “*” indicates any amino acid found in the corresponding position in the amino acid sequence of a Cas9 molecule of S. pyogenes, or N. meningitides, “-” indicates any amino acid, and “-” indicates any amino acid or absent. In an embodiment, a Cas9 molecule or Cas9 polypeptide differs from the sequence of SEQ ID NO:6 or 7 disclosed in FIGS. 7A-7B by at least 1, but no more than 2, 3, 4, 5, 6, 7, 8, 9, or 10 amino acid residues.

[0904] A comparison of the sequence of a number of Cas9 molecules indicate that certain regions are conserved. These are identified below as:

[0905] region 1 (residues 1 to 180, or in the case of region 1′ residues 120 to 180)

[0906] region 2 (residues360 to 480);

[0907] region 3 (residues 660 to 720);

[0908] region 4 (residues 817 to 900); and

[0909] region 5 (residues 900 to 960);

[0910] In an embodiment, a Cas9 molecule or Cas9 polypeptide comprises regions 1-5, together with sufficient additional Cas9 molecule sequence to provide a biologically active molecule, e.g., a Cas9 molecule having at least one activity described herein. In an embodiment, each of regions 1-6, independently, have, 50%, 60%, 70%, or 80% homology with the corresponding residues of a Cas9 molecule or Cas9 polypeptide described herein, e.g., a sequence from FIG. 2A-2G or from FIGS. 7A-7B.

[0911] In an embodiment, a Cas9 molecule or Cas9 polypeptide, e.g., an eaCas9 molecule or eaCas9 polypeptide, comprises an amino acid sequence referred to as region 1:

[0912] having 50%, 60%, 70%, 80%, 85%, 90%, 95%, 96%, 97%, 98% or 99% homology with amino acids 1-180 (the numbering is according to the motif sequence in FIGS. 2A-2G; 52% of residues in the four Cas9 sequences in FIGS. 2A-2G are conserved) of the amino acid sequence of Cas9 of S. pyogenes;

[0913] differs by at least 1, 2, 5, 10 or 20 amino acids but by no more than 90, 80, 70, 60, 50, 40 or 30 amino acids from amino acids 1-180 of the amino acid sequence of Cas9 of S. pyogenes, S. thermophilus, S. mutans or Listeria innocua; or

[0914] is identical to 1-180 of the amino acid sequence of Cas9 of S. pyogenes, S. thermophilus, S. mutans or L. innocua.

[0915] In an embodiment, a Cas9 molecule or Cas9 polypeptide, e.g., an eaCas9 molecule or eaCas9 polypeptide, comprises an amino acid sequence referred to as region 1′:

[0916] having 55%, 60%, 65%, 70%, 75%, 80%, 85%, 90%, 95%, 96%, 97%, 98% or 99% homology with amino acids 120-180 (55% of residues in the four Cas9 sequences in FIGS. 2A-2G are conserved) of the amino acid sequence of Cas9 of S. pyogenes, S. thermophilus, S. mutans or L. innocua;

[0917] differs by at least 1, 2, or 5 amino acids but by no more than 35, 30, 25, 20 or 10 amino acids from amino acids 120-180 of the amino acid sequence of Cas9 of S. pyogenes, S. thermophilus, S. mutans or L. innocua; or

[0918] is identical to 120-180 of the amino acid sequence of Cas9 of S. pyogenes, S. thermophilus, S. mutans or L. innocua.

[0919] In an embodiment, a Cas9 molecule or Cas9 polypeptide, e.g., an eaCas9 molecule or eaCas9 polypeptide, comprises an amino acid sequence referred to as region 2:

[0920] having 50%, 55%, 60%, 65%, 70%, 75%, 80%, 85%, 90%, 95%, 96%, 97%, 98% or 99% homology with amino acids 360-480 (52% of residues in the four Cas9 sequences in FIGS. 2A-2G are conserved) of the amino acid sequence of Cas9 of S. pyogenes, S. thermophilus, S. mutans or L. innocua;

[0921] differs by at least 1, 2, or 5 amino acids but by no more than 35, 30, 25, 20 or 10 amino acids from amino acids 360-480 of the amino acid sequence of Cas9 of S. pyogenes, S. thermophilus, S. mutans or L. innocua; or

[0922] is identical to 360-480 of the amino acid sequence of Cas9 of S. pyogenes, S. thermophilus, S. mutans or L. innocua.

[0923] In an embodiment, a Cas9 molecule or Cas9 polypeptide, e.g., an eaCas9 molecule or eaCas9 polypeptide, comprises an amino acid sequence referred to as region 3:

[0924] having 55%, 60%, 65%, 70%, 75%, 80%, 85%, 90%, 95%, 96%, 97%, 98%, or 99% homology with amino acids 660-720 (56% of residues in the four Cas9 sequences in FIGS. 2A-2G are conserved) of the amino acid sequence of Cas9 of S. pyogenes, S. thermophilus, S. mutans or L. innocua;

[0925] differs by at least 1, 2, or 5 amino acids but by no more than 35, 30, 25, 20 or 10 amino acids from amino acids 660-720 of the amino acid sequence of Cas9 of S. pyogenes, S. thermophilus, S. mutans or L. innocua; or

[0926] is identical to 660-720 of the amino acid sequence of Cas9 of S. pyogenes, S. thermophilus, S. mutans or L. innocua.

[0927] In an embodiment, a Cas9 molecule or Cas9 polypeptide, e.g., an eaCas9 molecule or eaCas9 polypeptide, comprises an amino acid sequence referred to as region 4:

[0928] having 50%, 55%, 60%, 65%, 70%, 75%, 80%, 85%, 90%, 95%, 96%, 97%, 98%, or 99% homology with amino acids 817-900 (55% of residues in the four Cas9 sequences in FIGS. 2A-2G are conserved) of the amino acid sequence of Cas9 of S. pyogenes, S. thermophilus, S. mutans or L. innocua;

[0929] differs by at least 1, 2, or 5 amino acids but by no more than 35, 30, 25, 20 or 10 amino acids from amino acids 817-900 of the amino acid sequence of Cas9 of S. pyogenes, S. thermophilus, S. mutans or L. innocua; or

[0930] is identical to 817-900 of the amino acid sequence of Cas9 of S. pyogenes, S. thermophilus, S. mutans or L. innocua.

[0931] In an embodiment, a Cas9 molecule or Cas9 polypeptide, e.g., an eaCas9 molecule or eaCas9 polypeptide, comprises an amino acid sequence referred to as region 5:

[0932] having 50%, 55%, 60%, 65%, 70%, 75%, 80%, 85%, 90%, 95%, 96%, 97%, 98%, or 99% homology with amino acids 900-960 (60% of residues in the four Cas9 sequences in FIGS. 2A-2G are conserved) of the amino acid sequence of Cas9 of S. pyogenes, S. thermophilus, S. mutans or L. innocua;

[0933] differs by at least 1, 2, or 5 amino acids but by no more than 35, 30, 25, 20 or 10 amino acids from amino acids 900-960 of the amino acid sequence of Cas9 of S. pyogenes, S. thermophilus, S. mutans or L. innocua; or

[0934] is identical to 900-960 of the amino acid sequence of Cas9 of S. pyogenes, S. thermophilus, S. mutans or L. innocua.

[0935] Engineered or Altered Cas9 Molecules and Cas9 Polypeptides

[0936] Cas9 molecules and Cas9 polypeptides described herein, e.g., naturally occurring Cas9 molecules, can possess any of a number of properties, including: nickase activity, nuclease activity (e.g., endonuclease and/or exonuclease activity); helicase activity; the ability to associate functionally with a gRNA molecule; and the ability to target (or localize to) a site on a nucleic acid (e.g., PAM recognition and specificity). In an embodiment, a Cas9 molecules or Cas9 polypeptide can include all or a subset of these properties. In typical embodiments, a Cas9 molecule or Cas9 polypeptide has the ability to interact with a gRNA molecule and, in concert with the gRNA molecule, localize to a site in a nucleic acid. Other activities, e.g., PAM specificity, cleavage activity, or helicase activity can vary more widely in Cas9 molecules and Cas9 polypeptides.

[0937] Cas9 molecules include engineered Cas9 molecules and engineered Cas9 polypeptides (engineered, as used in this context, means merely that the Cas9 molecule or Cas9 polypeptide differs from a reference sequences, and implies no process or origin limitation). An engineered Cas9 molecule or Cas9 polypeptide can comprise altered enzymatic properties, e.g., altered nuclease activity, (as compared with a naturally occurring or other reference Cas9 molecule) or altered helicase activity. As discussed herein, an engineered Cas9 molecule or Cas9 polypeptide can have nickase activity (as opposed to double strand nuclease activity). In an embodiment an engineered Cas9 molecule or Cas9 polypeptide can have an alteration that alters its size, e.g., a deletion of amino acid sequence that reduces its size, e.g., without significant effect on one or more, or any Cas9 activity. In an embodiment, an engineered Cas9 molecule or Cas9 polypeptide can comprise an alteration that affects PAM recognition. E.g., an engineered Cas9 molecule can be altered to recognize a PAM sequence other than that recognized by the endogenous wild-type PI domain. In an embodiment, a Cas9 molecule or Cas9 polypeptide can differ in sequence from a naturally occurring Cas9 molecule but not have significant alteration in one or more Cas9 activities.

[0938] Cas9 molecules or Cas9 polypeptides with desired properties can be made in a number of ways, e.g., by alteration of a parental, e.g., naturally occurring Cas9 molecules or Cas9 polypeptides to provide an altered Cas9 molecule or Cas9 polypeptide having a desired property. For example, one or more mutations or differences relative to a parental Cas9 molecule, e.g., a naturally occurring or engineered Cas9 molecule, can be introduced. Such mutations and differences comprise: substitutions (e.g., conservative substitutions or substitutions of non-essential amino acids); insertions; or deletions. In an embodiment, a Cas9 molecule or Cas9 polypeptide can comprises one or more mutations or differences, e.g., at least 1, 2, 3, 4, 5, 10, 15, 20, 30, 40 or 50 mutations, but less than 200, 100, or 80 mutations relative to a reference, e.g., a parental, Cas9 molecule.

[0939] In an embodiment, a mutation or mutations do not have a substantial effect on a Cas9 activity, e.g. a Cas9 activity described herein. In an embodiment, a mutation or mutations have a substantial effect on a Cas9 activity, e.g. a Cas9 activity described herein.

[0940] Non-Cleaving and Modified-Cleavage Cas9 Molecules and Cas9 Polypeptides

[0941] In an embodiment, a Cas9 molecule or Cas9 polypeptide comprises a cleavage property that differs from naturally occurring Cas9 molecules, e.g., that differs from the naturally occurring Cas9 molecule having the closest homology. For example, a Cas9 molecule or Cas9 polypeptide can differ from naturally occurring Cas9 molecules, e.g., a Cas9 molecule of S. pyogenes, as follows: its ability to modulate, e.g., decreased or increased, cleavage of a double stranded nucleic acid (endonuclease and/or exonuclease activity), e.g., as compared to a naturally occurring Cas9 molecule (e.g., a Cas9 molecule of S. pyogenes); its ability to modulate, e.g., decreased or increased, cleavage of a single strand of a nucleic acid, e.g., a non-complementary strand of a nucleic acid molecule or a complementary strand of a nucleic acid molecule (nickase activity), e.g., as compared to a naturally occurring Cas9 molecule (e.g., a Cas9 molecule of S. pyogenes); or the ability to cleave a nucleic acid molecule, e.g., a double stranded or single stranded nucleic acid molecule, can be eliminated.

[0942] Modified Cleavage eaCas9 Molecules and eaCas9 Polypeptides

[0943] In an embodiment, an eaCas9 molecule or eaCas9 polypeptide comprises one or more of the following activities: cleavage activity associated with an N-terminal RuvC-like domain; cleavage activity associated with an HNH-like domain; cleavage activity associated with an HNH-like domain and cleavage activity associated with an N-terminal RuvC-like domain.

[0944] In an embodiment, an eaCas9 molecule or eaCas9 polypeptide comprises an active, or cleavage competent, HNH-like domain (e.g., an HNH-like domain described herein, e.g., SEQ ID NO:17, SEQ ID NO:18, SEQ ID NO:19, SEQ ID NO:20 or SEQ ID NO: 21) and an inactive, or cleavage incompetent, N-terminal RuvC-like domain. An exemplary inactive, or cleavage incompetent N-terminal RuvC-like domain can have a mutation of an aspartic acid in an N-terminal RuvC-like domain, e.g., an aspartic acid at position 9 of the consensus sequence disclosed in FIGS. 2A-2G or an aspartic acid at position 10 of SEQ ID NO:7, e.g., can be substituted with an alanine. In an embodiment, the eaCas9 molecule or eaCas9 polypeptide differs from wild type in the N-terminal RuvC-like domain and does not cleave the target nucleic acid, or cleaves with significantly less efficiency, e.g., less than 20, 10, 5, 1 or 0.1% of the cleavage activity of a reference Cas9 molecule, e.g., as measured by an assay described herein. The reference Cas9 molecule can by a naturally occurring unmodified Cas9 molecule, e.g., a naturally occurring Cas9 molecule such as a Cas9 molecule of S. pyogenes, or S. thermophilus. In an embodiment, the reference Cas9 molecule is the naturally occurring Cas9 molecule having the closest sequence identity or homology.

[0945] In an embodiment, an eaCas9 molecule or eaCas9 polypeptide comprises an inactive, or cleavage incompetent, HNH domain and an active, or cleavage competent, N-terminal RuvC-like domain (e.g., an HNH-like domain described herein, e.g., SEQ ID NO:8, SEQ ID NO:9, SEQ ID NO:10, SEQ ID NO:11, SEQ ID NO:12, SEQ ID NO:13, SEQ ID NO:14 or SEQ ID NO:15). Exemplary inactive, or cleavage incompetent HNH-like domains can have a mutation at one or more of: a histidine in an HNH-like domain, e.g., a histidine shown at position 856 of the consensus sequence disclosed in FIGS. 2A-2G, e.g., can be substituted with an alanine; and one or more asparagines in an HNH-like domain, e.g., an asparagine shown at position 870 of the consensus sequence disclosed in FIGS. 2A-2G and/or at position 879 of the consensus sequence disclosed in FIGS. 2A-2G, e.g., can be substituted with an alanine. In an embodiment, the eaCas9 differs from wild type in the HNH-like domain and does not cleave the target nucleic acid, or cleaves with significantly less efficiency, e.g., less than 20, 10, 5, 1 or 0.1% of the cleavage activity of a reference Cas9 molecule, e.g., as measured by an assay described herein. The reference Cas9 molecule can by a naturally occurring unmodified Cas9 molecule, e.g., a naturally occurring Cas9 molecule such as a Cas9 molecule of S. pyogenes, or S. thermophilus. In an embodiment, the reference Cas9 molecule is the naturally occurring Cas9 molecule having the closest sequence identity or homology.

[0946] Alterations in the Ability to Cleave One or Both Strands of a Target Nucleic Acid

[0947] In an embodiment, exemplary Cas9 activities comprise one or more of PAM specificity, cleavage activity, and helicase activity. A mutation(s) can be present, e.g., in one or more RuvC-like domain, e.g., an N-terminal RuvC-like domain; an HNH-like domain; a region outside the RuvC-like domains and the HNH-like domain. In some embodiments, a mutation(s) is present in a RuvC-like domain, e.g., an N-terminal RuvC-like domain. In some embodiments, a mutation(s) is present in an HNH-like domain. In some embodiments, mutations are present in both aRuvC-like domain, e.g., an N-terminal RuvC-like domain and an HNH-like domain.

[0948] Exemplary mutations that may be made in the RuvC domain or HNH domain with reference to the S. pyogenes sequence include: D10A, E762A, H840A, N854A, N863A and/or D986A.

[0949] In an embodiment, a Cas9 molecule or Cas9 polypeptide is an eiCas9 molecule or eiCas9 polypeptide comprising one or more differences in a RuvC domain and/or in an HNH domain as compared to a reference Cas9 molecule, and the eiCas9 molecule or eiCas9 polypeptide does not cleave a nucleic acid, or cleaves with significantly less efficiency than does wildtype, e.g., when compared with wild type in a cleavage assay, e.g., as described herein, cuts with less than 50, 25, 10, or 1% of a reference Cas9 molecule, as measured by an assay described herein.

[0950] Whether or not a particular sequence, e.g., a substitution, may affect one or more activity, such as targeting activity, cleavage activity, etc, can be evaluated or predicted, e.g., by evaluating whether the mutation is conservative or by the method described in Section IV. In an embodiment, a “non-essential” amino acid residue, as used in the context of a Cas9 molecule, is a residue that can be altered from the wild-type sequence of a Cas9 molecule, e.g., a naturally occurring Cas9 molecule, e.g., an eaCas9 molecule, without abolishing or more preferably, without substantially altering a Cas9 activity (e.g., cleavage activity), whereas changing an “essential” amino acid residue results in a substantial loss of activity (e.g., cleavage activity).

[0951] In an embodiment, a Cas9 molecule or Cas9 polypeptide comprises a cleavage property that differs from naturally occurring Cas9 molecules, e.g., that differs from the naturally occurring Cas9 molecule having the closest homology. For example, a Cas9 molecule or Cas9 polypeptide can differ from naturally occurring Cas9 molecules, e.g., a Cas9 molecule of S. aureus, S. pyogenes, or C. jejuni as follows: its ability to modulate, e.g., decreased or increased, cleavage of a double stranded break (endonuclease and/or exonuclease activity), e.g., as compared to a naturally occurring Cas9 molecule (e.g., a Cas9 molecule of S. aureus, S. pyogenes, or C. jejuni); its ability to modulate, e.g., decreased or increased, cleavage of a single strand of a nucleic acid, e.g., a non-complimentary strand of a nucleic acid molecule or a complementary strand of a nucleic acid molecule (nickase activity), e.g., as compared to a naturally occurring Cas9 molecule (e.g., a Cas9 molecule of S. aureus, S. pyogenes, or C. jejuni); or the ability to cleave a nucleic acid molecule, e.g., a double stranded or single stranded nucleic acid molecule, can be eliminated.

[0952] In an embodiment, the altered Cas9 molecule or Cas9 polypeptide is an eaCas9 molecule or eaCas9 polypeptide comprising one or more of the following activities: cleavage activity associated with a RuvC domain; cleavage activity associated with an HNH domain; cleavage activity associated with an HNH domain and cleavage activity associated with a RuvC domain.

[0953] In an embodiment, the altered Cas9 molecule or Cas9 polypeptide is an eiCas9 molecule or eiCas9 polypeptide which does not cleave a nucleic acid molecule (either double stranded or single stranded nucleic acid molecules) or cleaves a nucleic acid molecule with significantly less efficiency, e.g., less than 20, 10, 5, 1 or 0.1% of the cleavage activity of a reference Cas9 molecule, e.g., as measured by an assay described herein. The reference Cas9 molecule can be a naturally occurring unmodified Cas9 molecule, e.g., a naturally occurring Cas9 molecule such as a Cas9 molecule of S. pyogenes, S. thermophilus, S. aureus, C. jejuni or N. meningitidis. In an embodiment, the reference Cas9 molecule is the naturally occurring Cas9 molecule having the closest sequence identity or homology. In an embodiment, the eiCas9 molecule or eiCas9 polypeptide lacks substantial cleavage activity associated with a RuvC domain and cleavage activity associated with an HNH domain.

[0954] In an embodiment, the altered Cas9 molecule or Cas9 polypeptide is an eaCas9 molecule or eaCas9 polypeptide comprising the fixed amino acid residues of S. pyogenes shown in the consensus sequence disclosed in FIGS. 2A-2G, and has one or more amino acids that differ from the amino acid sequence of S. pyogenes (e.g., has a substitution) at one or more residue (e.g., 2, 3, 5, 10, 15, 20, 30, 50, 70, 80, 90, 100, 200 amino acid residues) represented by an “-” in the consensus sequence disclosed in FIGS. 2A-2G or SEQ ID NO:7.

[0955] In an embodiment, the altered Cas9 molecule or Cas9 polypeptide comprises a sequence in which:

[0956] the sequence corresponding to the fixed sequence of the consensus sequence disclosed in FIGS. 2A-2G differs at no more than 1, 2, 3, 4, 5, 10, 15, or 20% of the fixed residues in the consensus sequence disclosed in FIGS. 2A-2G;

[0957] the sequence corresponding to the residues identified by “*” in the consensus sequence disclosed in FIGS. 2A-2G differ at no more than 1, 2, 3, 4, 5, 10, 15, 20, 25, 30, 35, or 40% of the “*” residues from the corresponding sequence of naturally occurring Cas9 molecule, e.g., an S. pyogenes Cas9 molecule; and,

[0958] the sequence corresponding to the residues identified by “-” in the consensus sequence disclosed in FIGS. 2A-2G differ at no more than 5, 10, 15, 20, 25, 30, 35, 40, 45, 55, or 60% of the “-” residues from the corresponding sequence of naturally occurring Cas9 molecule, e.g., an S. pyogenes Cas9 molecule.

[0959] In an embodiment, the altered Cas9 molecule or Cas9 polypeptide is an eaCas9 molecule or eaCas9 polypeptide comprising the fixed amino acid residues of S. thermophilus shown in the consensus sequence disclosed in FIGS. 2A-2G, and has one or more amino acids that differ from the amino acid sequence of S. thermophilus (e.g., has a substitution) at one or more residue (e.g., 2, 3, 5, 10, 15, 20, 30, 50, 70, 80, 90, 100, 200 amino acid residues) represented by an “-” in the consensus sequence disclosed in FIGS. 2A-2G.

[0960] In an embodiment the altered Cas9 molecule or Cas9 polypeptide comprises a sequence in which:

[0961] the sequence corresponding to the fixed sequence of the consensus sequence disclosed in FIGS. 2A-2G differs at no more than 1, 2, 3, 4, 5, 10, 15, or 20% of the fixed residues in the consensus sequence disclosed in FIGS. 2A-2G;

[0962] the sequence corresponding to the residues identified by “*” in the consensus sequence disclosed in FIGS. 2A-2G differ at no more than 1, 2, 3, 4, 5, 10, 15, 20, 25, 30, 35, or 40% of the “*” residues from the corresponding sequence of naturally occurring Cas9 molecule, e.g., an S. thermophilus Cas9 molecule; and,

[0963] the sequence corresponding to the residues identified by “-” in the consensus sequence disclosed in FIGS. 2A-2G differ at no more than 5, 10, 15, 20, 25, 30, 35, 40, 45, 55, or 60% of the “-” residues from the corresponding sequence of naturally occurring Cas9 molecule, e.g., an S. thermophilus Cas9 molecule.

[0964] In an embodiment, the altered Cas9 molecule or Cas9 polypeptide is an eaCas9 molecule or eaCas9 polypeptide comprising the fixed amino acid residues of S. mutans shown in the consensus sequence disclosed in FIGS. 2A-2G, and has one or more amino acids that differ from the amino acid sequence of S. mutans (e.g., has a substitution) at one or more residue (e.g., 2, 3, 5, 10, 15, 20, 30, 50, 70, 80, 90, 100, 200 amino acid residues) represented by an “-” in the consensus sequence disclosed in FIGS. 2A-2G.

[0965] In an embodiment, the altered Cas9 molecule or Cas9 polypeptide comprises a sequence in which: the sequence corresponding to the fixed sequence of the consensus sequence disclosed in FIGS. 2A-2G differs at no more than 1, 2, 3, 4, 5, 10, 15, or 20% of the fixed residues in the consensus sequence disclosed in FIGS. 2A-2G;

[0966] the sequence corresponding to the residues identified by “*” in the consensus sequence disclosed in FIGS. 2A-2G differ at no more than 1, 2, 3, 4, 5, 10, 15, 20, 25, 30, 35, or 40% of the “*” residues from the corresponding sequence of naturally occurring Cas9 molecule, e.g., an S. mutans Cas9 molecule; and,

[0967] the sequence corresponding to the residues identified by “-” in the consensus sequence disclosed in FIGS. 2A-2G differ at no more than 5, 10, 15, 20, 25, 30, 35, 40, 45, 55, or 60% of the “-” residues from the corresponding sequence of naturally occurring Cas9 molecule, e.g., an S. mutans Cas9 molecule.

[0968] In an embodiment, the altered Cas9 molecule or Cas9 polypeptide is an eaCas9 molecule or eaCas9 polypeptide comprising the fixed amino acid residues of L. innocula shown in the consensus sequence disclosed in FIGS. 2A-2G, and has one or more amino acids that differ from the amino acid sequence of L. innocula (e.g., has a substitution) at one or more residue (e.g., 2, 3, 5, 10, 15, 20, 30, 50, 70, 80, 90, 100, 200 amino acid residues) represented by an “-”in the consensus sequence disclosed in FIGS. 2A-2G.

[0969] In an embodiment, the altered Cas9 molecule or Cas9 polypeptide comprises a sequence in which:

[0970] the sequence corresponding to the fixed sequence of the consensus sequence disclosed in FIGS. 2A-2G differs at no more than 1, 2, 3, 4, 5, 10, 15, or 20% of the fixed residues in the consensus sequence disclosed in FIGS. 2A-2G;

[0971] the sequence corresponding to the residues identified by “*” in the consensus sequence disclosed in FIGS. 2A-2G differ at no more than 1, 2, 3, 4, 5, 10, 15, 20, 25, 30, 35, or 40% of the “*” residues from the corresponding sequence of naturally occurring Cas9 molecule, e.g., an L. innocula Cas9 molecule; and,

[0972] the sequence corresponding to the residues identified by “-” in the consensus sequence disclosed in FIGS. 2A-2G differ at no more than 5, 10, 15, 20, 25, 30, 35, 40, 45, 55, or 60% of the “-” residues from the corresponding sequence of naturally occurring Cas9 molecule, e.g., an L. innocula Cas9 molecule.

[0973] In an embodiment, the altered Cas9 molecule or Cas9 polypeptide, e.g., an eaCas9 molecule or eaCas9 polypeptide, can be a fusion, e.g., of two of more different Cas9 molecules, e.g., of two or more naturally occurring Cas9 molecules of different species. For example, a fragment of a naturally occurring Cas9 molecule of one species can be fused to a fragment of a Cas9 molecule of a second species. As an example, a fragment of Cas9 molecule of S. pyogenes comprising an N-terminal RuvC-like domain can be fused to a fragment of Cas9 molecule of a species other than S. pyogenes (e.g., S. thermophilus) comprising an HNH-like domain.

[0974] Cas9 Molecules and Cas9 Polypeptides with Altered PAM Recognition or No PAM Recognition

[0975] Naturally occurring Cas9 molecules can recognize specific PAM sequences, for example the PAM recognition sequences described above for S. pyogenes, S. thermophilus and S. mutans.

[0976] In an embodiment, a Cas9 molecule or Cas9 polypeptide has the same PAM specificities as a naturally occurring Cas9 molecule. In other embodiments, a Cas9 molecule or Cas9 polypeptide has a PAM specificity not associated with a naturally occurring Cas9 molecule, or a PAM specificity not associated with the naturally occurring Cas9 molecule to which it has the closest sequence homology. For example, a naturally occurring Cas9 molecule can be altered, e.g., to alter PAM recognition, e.g., to alter the PAM sequence that the Cas9 molecule recognizes to decrease off target sites and/or improve specificity; or eliminate a PAM recognition requirement. In an embodiment, a Cas9 molecule or Cas9 polypeptide can be altered, e.g., to increase length of PAM recognition sequence and/or improve Cas9 specificity to high level of identity (e.g., 98%, 99% or 100% match between gRNA and a PAM sequence), e.g., to decrease off target sites and increase specificity. In an embodiment, the length of the PAM recognition sequence is at least 4, 5, 6, 7, 8, 9, 10 or 15 amino acids in length. In an embodiment, the Cas9 specificity requires at least 90%, 95%, 96%, 97%, 98%, 99% or more homology between the gRNA and the PAM sequence. Cas9 molecules or Cas9 polypeptides that recognize different PAM sequences and/or have reduced off-target activity can be generated using directed evolution. Exemplary methods and systems that can be used for directed evolution of Cas9 molecules are described, e.g., in Esvelt et al. NATURE 2011, 472(7344): 499-503. Candidate Cas9 molecules can be evaluated, e.g., by methods described in Section IV.

[0977] Alterations of the PI domain, which mediates PAM recognition, are discussed below.

[0978] Synthetic Cas9 Molecules and Cas9 Polypeptides with Altered PI Domains

[0979] Current genome-editing methods are limited in the diversity of target sequences that can be targeted by the PAM sequence that is recognized by the Cas9 molecule utilized. A synthetic Cas9 molecule (or Syn-Cas9 molecule), or synthetic Cas9 polypeptide (or Syn-Cas9 polypeptide), as that term is used herein, refers to a Cas9 molecule or Cas9 polypeptide that comprises a Cas9 core domain from one bacterial species and a functional altered PI domain, i.e., a PI domain other than that naturally associated with the Cas9 core domain, e.g., from a different bacterial species.

[0980] In an embodiment, the altered PI domain recognizes a PAM sequence that is different from the PAM sequence recognized by the naturally-occurring Cas9 from which the Cas9 core domain is derived. In an embodiment, the altered PI domain recognizes the same PAM sequence recognized by the naturally-occurring Cas9 from which the Cas9 core domain is derived, but with different affinity or specificity. A Syn-Cas9 molecule or Syn-Cas9 polypetide can be, respectively, a Syn-eaCas9 molecule or Syn-eaCas9 polypeptide or a Syn-eiCas9 molecule Syn-eiCas9 polypeptide.

[0981] An exemplary Syn-Cas9 molecule or Syn-Cas9 polypetide comprises:

[0982] a) a Cas9 core domain, e.g., a Cas9 core domain from Table 7 or 8, e.g., a S. aureus, S. pyogenes, or C. jejuni Cas9 core domain; and

[0983] b) an altered PI domain from a species X Cas9 sequence selected from Tables 10 and 11.

[0984] In an embodiment, the RKR motif (the PAM binding motif) of said altered PI domain comprises: differences at 1, 2, or 3 amino acid residues; a difference in amino acid sequence at the first, second, or third position; differences in amino acid sequence at the first and second positions, the first and third positions, or the second and third positions; as compared with the sequence of the RKR motif of the native or endogenous PI domain associated with the Cas9 core domain.

[0985] In an embodiment, the Cas9 core domain comprises the Cas9 core domain from a species X Cas9 from Table 7 and said altered PI domain comprises a PI domain from a species Y Cas9 from Table 7.

[0986] In an embodiment, the RKR motif of the species X Cas9 is other than the RKR motif of the species Y Cas9.

[0987] In an embodiment, the RKR motif of the altered PI domain is selected from XXY, XNG, and XNQ.

[0988] In an embodiment, the altered PI domain has at least 60, 70, 80, 90, 95, or 100% homology with the amino acid sequence of a naturally occurring PI domain of said species Y from Table 7.

[0989] In an embodiment, the altered PI domain differs by no more than 50, 40, 30, 25, 20, 15, 10, 5, 4, 3, 2, or 1 amino acid residue from the amino acid sequence of a naturally occurring PI domain of said second species from Table 7.

[0990] In an embodiment, the Cas9 core domain comprises a S. aureus core domain and altered PI domain comprises: an A. denitrificans PI domain; a C. jejuni PI domain; a H. mustelae PI domain; or an altered PI domain of species X PI domain, wherein species X is selected from Table 11.

[0991] In an embodiment, the Cas9 core domain comprises a S. pyogenes core domain and the altered PI domain comprises: an A. denitrificans PI domain; a C. jejuni PI domain; a H. mustelae PI domain; or an altered PI domain of species X PI domain, wherein species X is selected from Table 11.

[0992] In an embodiment, the Cas9 core domain comprises a C. jejuni core domain and the altered PI domain comprises: an A. denitrificans PI domain; a H. mustelae PI domain; or an altered PI domain of species X PI domain, wherein species X is selected from Table 11.

[0993] In an embodiment, the Cas9 molecule or Cas9 polypeptide further comprises a linker disposed between said Cas9 core domain and said altered PI domain.

[0994] In an embodiment, the linker comprises: a linker described elsewhere herein disposed between the Cas9 core domain and the heterologous PI domain. Suitable linkers are further described in Section V.

[0995] Exemplary altered PI domains for use in Syn-Cas9 molecules are described in Tables 10 and 11. The sequences for the 83 Cas9 orthologs referenced in Tables 10 and 11 are provided in Table 7. Table 9 provides the Cas9 orthologs with known PAM sequences and the corresponding RKR motif.

[0996] In an embodiment, a Syn-Cas9 molecule or Syn-Cas9 polypeptide may also be size-optimized, e.g., the Syn-Cas9 molecule or Syn-Cas9 polypeptide comprises one or more deletions, and optionally one or more linkers disposed between the amino acid residues flanking the deletions. In an embodiment, a Syn-Cas9 molecule or Syn-Cas9 polypeptide comprises a REC deletion.

[0997] Size-Optimized Cas9 Molecules and Cas9 Polypeptides

[0998] Engineered Cas9 molecules and engineered Cas9 polypeptides described herein include a Cas9 molecule or Cas9 polypeptide comprising a deletion that reduces the size of the molecule while still retaining desired Cas9 properties, e.g., essentially native conformation, Cas9 nuclease activity, and/or target nucleic acid molecule recognition. Provided herein are Cas9 molecules or Cas9 polypeptides comprising one or more deletions and optionally one or more linkers, wherein a linker is disposed between the amino acid residues that flank the deletion. Methods for identifying suitable deletions in a reference Cas9 molecule, methods for generating Cas9 molecules with a deletion and a linker, and methods for using such Cas9 molecules will be apparent to one of ordinary skill in the art upon review of this document.

[0999] A Cas9 molecule, e.g., a S. aureus, S. pyogenes, or C. jejuni, Cas9 molecule, having a deletion is smaller, e.g., has reduced number of amino acids, than the corresponding naturally-occurring Cas9 molecule. The smaller size of the Cas9 molecules allows increased flexibility for delivery methods, and thereby increases utility for genome-editing. A Cas9 molecule or Cas9 polypeptide can comprise one or more deletions that do not substantially affect or decrease the activity of the resultant Cas9 molecules or Cas9 polypeptides described herein. Activities that are retained in the Cas9 molecules or Cas9 polypeptides comprising a deletion as described herein include one or more of the following:

[1000] a nickase activity, i.e., the ability to cleave a single strand, e.g., the non-complementary strand or the complementary strand, of a nucleic acid molecule; a double stranded nuclease activity, i.e., the ability to cleave both strands of a double stranded nucleic acid and create a double stranded break, which in an embodiment is the presence of two nickase activities;

[1001] an endonuclease activity;

[1002] an exonuclease activity;

[1003] a helicase activity, i.e., the ability to unwind the helical structure of a double stranded nucleic acid;

[1004] and recognition activity of a nucleic acid molecule, e.g., a target nucleic acid or a gRNA.

[1005] Activity of the Cas9 molecules or Cas9 polypeptides described herein can be assessed using the activity assays described herein or in the art.

[1006] Identifying Regions Suitable for Deletion

[1007] Suitable regions of Cas9 molecules for deletion can be identified by a variety of methods. Naturally-occurring orthologous Cas9 molecules from various bacterial species, e.g., any one of those listed in Table 7, can be modeled onto the crystal structure of S. pyogenes Cas9 (Nishimasu et al., Cell, 156:935-949, 2014) to examine the level of conservation across the selected Cas9 orthologs with respect to the three-dimensional conformation of the protein. Less conserved or unconserved regions that are spatially located distant from regions involved in Cas9 activity, e.g., interface with the target nucleic acid molecule and/or gRNA, represent regions or domains are candidates for deletion without substantially affecting or decreasing Cas9 activity.

[1008] REC-Optimized Cas9 Molecules and Cas9 Polypeptides

[1009] A REC-optimized Cas9 molecule, or a REC-optimized Cas9 polypeptide, as that term is used herein, refers to a Cas9 molecule or Cas9 polypeptide that comprises a deletion in one or both of the REC2 domain and the RE1_{CT} domain (collectively a REC deletion), wherein the deletion comprises at least 10% of the amino acid residues in the cognate domain. A REC-optimized Cas9 molecule or Cas9 polypeptide can be an eaCas9 molecule or eaCas9 polypetide, or an eiCas9 molecule or eiCas9 polypeptide. An exemplary REC-optimized Cas9 molecule or REC-optimized Cas9 polypeptide comprises:
[1010] a) a deletion selected from:
   [1011] i) a REC2 deletion;
   [1012] ii) a REC1_{CT} deletion; or
   [1013] iii) a REC1_{SUB} deletion.

[1014] Optionally, a linker is disposed between the amino acid residues that flank the deletion. In an embodiment, a Cas9 molecule or Cas9 polypeptide includes only one deletion, or only two deletions. A Cas9 molecule or Cas9 polypeptide can comprise a REC2 deletion and a REC1_{CT} deletion. A Cas9 molecule or Cas9 polypeptide can comprise a REC2 deletion and a REC1_{SUB} deletion.

[1015] Generally, the deletion will contain at least 10% of the amino acids in the cognate domain, e.g., a REC2 deletion will include at least 10% of the amino acids in the REC2 domain.

[1016] A deletion can comprise: at least 10, 20, 30, 40, 50, 60, 70, 80, or 90% of the amino acid residues of its cognate domain; all of the amino acid residues of its cognate domain; an amino acid residue outside its cognate domain; a plurality of amino acid residues outside its cognate domain; the amino acid residue immediately N terminal to its cognate domain; the amino acid residue immediately C terminal to its cognate domain; the amino acid residue immediately N terminal to its cognate and the amino acid residue immediately C terminal to its cognate domain; a plurality of, e.g., up to 5, 10, 15, or 20, amino acid residues N terminal to its cognate domain; a plurality of, e.g., up to 5, 10, 15, or 20, amino acid residues C terminal to its cognate domain; a plurality of, e.g., up to 5, 10, 15, or 20, amino acid residues N terminal to to its cognate domain and a plurality of e.g., up to 5, 10, 15, or 20, amino acid residues C terminal to its cognate domain.

[1017] In an embodiment, a deletion does not extend beyond: its cognate domain; the N terminal amino acid residue of its cognate domain; the C terminal amino acid residue of its cognate domain.

[1018] A REC-optimized Cas9 molecule or REC-optimized Cas9 polypeptide can include a linker disposed between the amino acid residues that flank the deletion. Any linkers known in the art that maintain the conformation or native fold of the Cas9 molecule (thereby retaining Cas9 activity) can be used between the amino acid resides that flank a REC deletion in a REC-optimized Cas9 molecule or REC-optimized Cas9 polypeptide. Linkers for use in generating recombinant proteins, e.g., multi-domain proteins, are known in the art (Chen et al., Adv Drug Delivery Rev, 65:1357-69, 2013).

[1019] In an embodiment, a REC-optimized Cas9 molecule or REC-optimized Cas9 polypeptide comprises an amino acid sequence that, other than any REC deletion and associated linker, has at least 50, 55, 60, 65, 70, 75, 80, 85, 90, 95, 99, or 100% homology with the amino acid sequence of a naturally occurring Cas9, e.g., a Cas9 molecule described in Table 7, e.g., a S. aureus Cas9 molecule, a S. pyogenes Cas9 molecule, or a C. jejuni Cas9 molecule.

[1020] In an embodiment, a a REC-optimized Cas9 molecule or REC-optimized Cas9 polypeptide comprises an amino acid sequence that, other than any REC deletion and associated linker, differs by no more than 1, 2, 3, 4, 5, 6, 7, 8, 9, 10, 15, 20, or 25, amino acid residues from the amino acid sequence of a naturally occurring Cas9, e.g., a Cas9 molecule described in Table 7, e.g., a S. aureus Cas9 molecule, a S. pyogenes Cas9 molecule, or a C. jejuni Cas9 molecule.

[1021] In an embodiment, a REC-optimized Cas9 molecule or REC-optimized Cas9 polypeptide comprises an amino acid sequence that, other than any REC deletion and associate linker, differs by no more than 1, 2, 3, 4, 5, 6, 7, 8, 9, 10, 15, 20, or 25% of the, amino acid residues from the amino acid sequence of a naturally occurring Cas9, e.g., a Cas9 molecule described in Table 7, e.g., a S. aureus Cas9 molecule, a S. pyogenes Cas9 molecule, or a C. jejuni Cas9 molecule.

[1022] For sequence comparison, typically one sequence acts as a reference sequence, to which test sequences are compared. When using a sequence comparison algorithm, test and reference sequences are entered into a computer, subsequence coordinates are designated, if necessary, and sequence algorithm program parameters are designated. Default program parameters can be used, or alternative parameters can be designated. The sequence comparison algorithm then calculates the percent sequence identities for the test sequences relative to the reference sequence, based on the program parameters. Methods of alignment of sequences for comparison are well known in the art. Optimal alignment of sequences for comparison can be conducted, e.g., by the local homology algorithm of Smith and Waterman, (1970) Adv. Appl. Math. 2:482c, by the homology alignment algorithm of Needleman and Wunsch, (1970) J. Mol. Biol. 48:443, by the search for similarity method of Pearson and Lipman, (1988) Proc. Nat'l. Acad. Sci. USA 85:2444, by computerized implementations of these algorithms (GAP, BESTFIT, FASTA, and TFASTA in the Wisconsin Genetics Software Package, Genetics Computer Group, 575 Science Dr., Madison, Wis.), or by manual alignment and visual inspection (see, e.g., Brent et al., (2003) Current Protocols in Molecular Biology).

[1023] Two examples of algorithms that are suitable for determining percent sequence identity and sequence similarity are the BLAST and BLAST 2.0 algorithms, which are described in Altschul et al., (1977) Nuc. Acids Res. 25:3389-3402; and Altschul et al., (1990) J. Mol. Biol. 215:403-410, respectively. Software for performing BLAST analyses is publicly available through the National Center for Biotechnology Information.

[1024] The percent identity between two amino acid sequences can also be determined using the algorithm of E. Meyers and W. Miller, (1988) Comput. Appl. Biosci. 4:11-17) which has been incorporated into the ALIGN program (version 2.0), using a PAM120 weight residue table, a gap length penalty of 12 and a gap penalty of 4. In addition, the percent identity between two amino acid sequences can be determined using the Needleman and Wunsch (1970) J. Mol. Biol. 48:444-453) algorithm which has been incorporated into the GAP program in the GCG software package (available at www.gcg.com), using either a Blossom 62 matrix or a PAM250 matrix, and a gap weight of 16, 14, 12, 10, 8, 6, or 4 and a length weight of 1, 2, 3, 4, 5, or 6.

[1025] Sequence information for exemplary REC deletions are provided for 83 naturally-occurring Cas9 orthologs in Table 7.

[1026] The amino acid sequences of exemplary Cas9 molecules from different bacterial species are shown below.

TABLE 7
Amino Acid Sequence of Cas9 Orthologs

| | | REC2 | | | REC1_{CT} | | | Rec_{sub} | | |
|---|---|---|---|---|---|---|---|---|---|---|
| | | start | stop | # AA | start | stop | # AA | start | stop | # AA |
| | Amino acid | (AA | (AA | deleted | (AA | (AA | deleted | (AA | (AA | deleted |
| Species/Composite ID | sequence | pos) | pos) | (n) | pos) | pos) | (n) | pos) | pos) | (n) |
| Staphylococcus Aureus | SEQ ID NO: | 126 | 166 | 41 | 296 | 352 | 57 | 296 | 352 | 57 |
| tr\|J7RUA5\|J7RUA5_STAAU | 304 | | | | | | | | | |
| Streptococcus Pyogenes | SEQ ID NO: | 176 | 314 | 139 | 511 | 592 | 82 | 511 | 592 | 82 |
| sp\|Q99ZW2\|CAS9_STRP1 | 305 | | | | | | | | | |
| Campylobacter jejuni NCTC | SEQ ID NO: | 137 | 181 | 45 | 316 | 360 | 45 | 316 | 360 | 45 |
| 11168 | 306 | | | | | | | | | |
| gi\|218563121\|ref\|YP_002344900.1 | | | | | | | | | | |
| Bacteroides fragilis NCTC 9343 | SEQ ID NO: | 148 | 339 | 192 | 524 | 617 | 84 | 524 | 617 | 84 |
| gi\|60683389\|ref\|YP_213533.1\| | 307 | | | | | | | | | |
| Bifidobacterium bifidum S17 | SEQ ID NO: | 173 | 335 | 163 | 516 | 607 | 87 | 516 | 607 | 87 |
| gi\|310286728\|ref\|YP_003937986. | 308 | | | | | | | | | |
| Veillonella atypica ACS-134-V- | SEQ ID NO: | 185 | 339 | 155 | 574 | 663 | 79 | 574 | 663 | 79 |
| Col7a | 309 | | | | | | | | | |
| gi\|303229466\|ref\|ZP_07316256.1 | | | | | | | | | | |
| Lactobacillus rhamnosus GG | SEQ ID NO: | 169 | 320 | 152 | 559 | 645 | 78 | 559 | 645 | 78 |
| gi\|258509199\|ref\|YP_003171950.1 | 310 | | | | | | | | | |
| Filifactor alocis ATCC 35896 | SEQ ID NO: | 166 | 314 | 149 | 508 | 592 | 76 | 508 | 592 | 76 |
| gi\|374307738\|ref\|YP_005054169.1 | 311 | | | | | | | | | |
| Oenococcus kitaharae DSM | SEQ ID NO: | 169 | 317 | 149 | 555 | 639 | 80 | 555 | 639 | 80 |
| 17330 | 312 | | | | | | | | | |
| gi\|366983953\|gb\|EHN59352.1\| | | | | | | | | | | |
| Fructobacillus fructosus KCTC | SEQ ID NO: | 168 | 314 | 147 | 488 | 571 | 76 | 488 | 571 | 76 |
| 3544 | 313 | | | | | | | | | |
| gi\|339625081\|ref\|ZP_08660870.1 | | | | | | | | | | |
| Catenibacterium mitsuokai DSM | SEQ ID NO: | 173 | 318 | 146 | 511 | 594 | 78 | 511 | 594 | 78 |
| 15897 | 314 | | | | | | | | | |
| gi\|224543312\|ref\|ZP_03683851.1 | | | | | | | | | | |
| Finegoldia magna ATCC 29328 | SEQ ID NO: | 168 | 313 | 146 | 452 | 534 | 77 | 452 | 534 | 77 |
| gi\|169823755\|ref\|YP_001691366.1 | 315 | | | | | | | | | |
| Coriobacterium glomerans PW2 | SEQ ID NO: | 175 | 318 | 144 | 511 | 592 | 82 | 511 | 592 | 82 |
| gi\|328956315\|ref\|YP_004373648.1 | 316 | | | | | | | | | |
| Eubacterium yurii ATCC 43715 | SEQ ID NO: | 169 | 310 | 142 | 552 | 633 | 76 | 552 | 633 | 76 |
| gi\|306821691\|ref\|ZP_07455288.1 | 317 | | | | | | | | | |
| Peptoniphilus duerdenii ATCC | SEQ ID NO: | 171 | 311 | 141 | 535 | 615 | 76 | 535 | 615 | 76 |
| BAA-1640 | 318 | | | | | | | | | |
| gi\|304438954\|ref\|ZP_07398877.1 | | | | | | | | | | |
| Acidaminococcus sp. D21 | SEQ ID NO: | 167 | 306 | 140 | 511 | 591 | 75 | 511 | 591 | 75 |
| gi\|227824983\|ref\|ZP_03989815.1 | 319 | | | | | | | | | |
| Lactobacillus farciminis KCTC | SEQ ID NO: | 171 | 310 | 140 | 542 | 621 | 85 | 542 | 621 | 85 |
| 3681 | 320 | | | | | | | | | |
| gi\|336394882\|ref\|ZP_08576281.1 | | | | | | | | | | |
| Streptococcus sanguinis SK49 | SEQ ID NO: | 185 | 324 | 140 | 411 | 490 | 85 | 411 | 490 | 85 |
| gi\|422884106\|ref\|ZP_16930555.1 | 321 | | | | | | | | | |
| Coprococcus catus GD-7 | SEQ ID NO: | 172 | 310 | 139 | 556 | 634 | 76 | 556 | 634 | 76 |
| gi\|291520705\|emb\|CBK78998.1\| | 322 | | | | | | | | | |
| Streptococcus mutans UA159 | SEQ ID NO: | 176 | 314 | 139 | 392 | 470 | 84 | 392 | 470 | 84 |
| gi\|24379809\|ref\|NP_721764.1\| | 323 | | | | | | | | | |
| Streptococcus pyogenes M1 | SEQ ID NO: | 176 | 314 | 139 | 523 | 600 | 82 | 523 | 600 | 82 |
| GAS | 324 | | | | | | | | | |
| gi\|13622193\|gb\|AAK33936.1\| | | | | | | | | | | |
| Streptococcus thermophilus | SEQ ID NO: | 176 | 314 | 139 | 481 | 558 | 81 | 481 | 558 | 81 |
| LMD-9 | 325 | | | | | | | | | |
| gi\|116628213\|ref\|YP_820832.1\| | | | | | | | | | | |
| Fusobacterium nucleatum | SEQ ID NO: | 171 | 308 | 138 | 537 | 614 | 76 | 537 | 614 | 76 |
| ATCC49256 | 326 | | | | | | | | | |
| gi\|34762592\|ref\|ZP_00143587.1\| | | | | | | | | | | |
| Planococcus antarcticus DSM | SEQ ID NO: | 162 | 299 | 138 | 538 | 614 | 94 | 538 | 614 | 94 |
| 14505 | 327 | | | | | | | | | |
| gi\|389815359\|ref\|ZP_10206685.1 | | | | | | | | | | |
| Treponema denticola ATCC | SEQ ID NO: | 169 | 305 | 137 | 524 | 600 | 81 | 524 | 600 | 81 |
| 35405 | 328 | | | | | | | | | |
| gi\|42525843\|ref\|NP_970941.1\| | | | | | | | | | | |
| Solobacterium moorei F0204 | SEQ ID NO: | 179 | 314 | 136 | 544 | 619 | 77 | 544 | 619 | 77 |
| gi\|320528778\|ref\|ZP_08029929.1 | 329 | | | | | | | | | |
| Staphylococcus | SEQ ID NO: | 164 | 299 | 136 | 531 | 606 | 92 | 531 | 606 | 92 |
| pseudintermedius ED99 | 330 | | | | | | | | | |
| gi\|323463801\|gb\|ADX75954.1\| | | | | | | | | | | |
| Flavobacterium branchiophilum | SEQ ID NO: | 162 | 286 | 125 | 538 | 613 | 63 | 538 | 613 | 63 |
| FL-15 | 331 | | | | | | | | | |
| gi\|347536497\|ref\|YP_004843922.1 | | | | | | | | | | |
| Ignavibacterium album JCM | SEQ ID NO: | 223 | 329 | 107 | 357 | 432 | 90 | 357 | 432 | 90 |
| 16511 | 332 | | | | | | | | | |
| gi\|385811609\|ref\|YP_005848005.1 | | | | | | | | | | |
| Bergeyella zoohelcum ATCC | SEQ ID NO: | 165 | 261 | 97 | 529 | 604 | 56 | 529 | 604 | 56 |
| 43767 | 333 | | | | | | | | | |
| gi\|423317190\|ref\|ZP_17295095.1 | | | | | | | | | | |
| Nitrobacter hamburgensis X14 | SEQ ID NO: | 169 | 253 | 85 | 536 | 611 | 48 | 536 | 611 | 48 |
| gi\|92109262\|ref\|YP_571550.1\| | 334 | | | | | | | | | |
| Odoribacter laneus YIT 12061 | SEQ ID NO: | 164 | 242 | 79 | 535 | 610 | 63 | 535 | 610 | 63 |
| gi\|374384763\|ref\|ZP_09642280.1 | 335 | | | | | | | | | |
| Legionella pneumophila str. | SEQ ID NO: | 164 | 239 | 76 | 402 | 476 | 67 | 402 | 476 | 67 |
| Paris | 336 | | | | | | | | | |
| gi\|54296138\|ref\|YP_122507.1\| | | | | | | | | | | |
| Bacteroides sp. 20 3 | SEQ ID NO: | 198 | 269 | 72 | 530 | 604 | 83 | 530 | 604 | 83 |
| gi\|301311869\|ref\|ZP_07217791.1 | 337 | | | | | | | | | |
| Akkermansia muciniphila ATCC | SEQ ID NO: | 136 | 202 | 67 | 348 | 418 | 62 | 348 | 418 | 62 |
| BAA-835 | 338 | | | | | | | | | |
| gi\|187736489\|ref\|YP_001878601. | | | | | | | | | | |
| Prevotella sp. C561 | SEQ ID NO: | 184 | 250 | 67 | 357 | 425 | 78 | 357 | 425 | 78 |
| gi\|345885718\|ref\|ZP_08837074.1 | 339 | | | | | | | | | |
| Wolinella succinogenes DSM | SEQ ID NO: | 157 | 218 | 36 | 401 | 468 | 60 | 401 | 468 | 60 |
| 1740 | 340 | | | | | | | | | |
| gi\|34557932\|ref\|NP_907747.1\| | | | | | | | | | | |
| Alicyclobacillus hesperidum | SEQ ID NO: | 142 | 196 | 55 | 416 | 482 | 61 | 416 | 482 | 61 |
| URH17-3-68 | 341 | | | | | | | | | |
| gi\|403744858\|ref\|ZP_10953934.1 | | | | | | | | | | |
| Caenispirillum salinarum AK4 | SEQ ID NO: | 161 | 214 | 54 | 330 | 393 | 68 | 330 | 393 | 68 |
| gi\|427429481\|ref\|ZP_18919511.1 | 342 | | | | | | | | | |
| Eubacterium rectale ATCC | SEQ ID NO: | 133 | 185 | 53 | 322 | 384 | 60 | 322 | 384 | 60 |
| 33656 | 343 | | | | | | | | | |
| gi\|238924075\|ref\|YP_002937591.1 | | | | | | | | | | |
| Mycoplasma synoviae 53 | SEQ ID NO: | 187 | 239 | 53 | 319 | 381 | 80 | 319 | 381 | 80 |
| gi\|71894592\|ref\|YP_278700.1\| | 344 | | | | | | | | | |
| Porphyromonas sp. oral taxon | SEQ ID NO: | 150 | 202 | 53 | 309 | 371 | 60 | 309 | 371 | 60 |
| 279 str. F0450 | 345 | | | | | | | | | |
| gi\|402847315\|ref\|ZP_10895610.1 | | | | | | | | | | |
| Streptococcus thermophilus | SEQ ID NO: | 127 | 178 | 139 | 424 | 486 | 81 | 424 | 486 | 81 |
| LMD-9 | 346 | | | | | | | | | |
| gi\|116627542\|ref\|YP_820161.1\| | | | | | | | | | | |
| Roseburia inulinivorans DSM | SEQ ID NO: | 154 | 204 | 51 | 318 | 380 | 69 | 318 | 380 | 69 |
| 16841 | 347 | | | | | | | | | |
| gi\|225377804\|ref\|ZP_03755025.1 | | | | | | | | | | |
| Methylosinus trichosporium | SEQ ID NO: | 144 | 193 | 50 | 426 | 488 | 64 | 426 | 488 | 64 |
| OB3b | 348 | | | | | | | | | |
| gi\|296446027\|ref\|ZP_06887976.1 | | | | | | | | | | |
| Ruminococcus albus 8 | SEQ ID NO: | 139 | 187 | 49 | 351 | 412 | 55 | 351 | 412 | 55 |
| gi\|325677756\|ref\|ZP_08157403.1 | 349 | | | | | | | | | |
| Bifidobacterium longum | SEQ ID NO: | 183 | 230 | 48 | 370 | 431 | 44 | 370 | 431 | 44 |
| DJO10A | 350 | | | | | | | | | |
| gi\|189440764\|ref\|YP_001955845. | | | | | | | | | | |
| Enterococcus faecalis TX0012 | SEQ ID NO: | 123 | 170 | 48 | 327 | 387 | 60 | 327 | 387 | 60 |
| gi\|315149830\|gb\|EFT93846.1\| | 351 | | | | | | | | | |
| Mycoplasma mobile 163K | SEQ ID NO: | 179 | 226 | 48 | 314 | 374 | 79 | 314 | 374 | 79 |
| gi\|47458868\|ref\|YP_015730.1\| | 352 | | | | | | | | | |
| Actinomyces coleocanis DSM | SEQ ID NO: | 147 | 193 | 47 | 358 | 418 | 40 | 358 | 418 | 40 |
| 15436 | 353 | | | | | | | | | |
| gi\|227494853\|ref\|ZP_03925169.1 | | | | | | | | | | |
| Dinoroseobacter shibae DFL 12 | SEQ ID NO: | 138 | 184 | 47 | 338 | 398 | 48 | 338 | 398 | 48 |
| gi\|159042956\|ref\|YP_001531750.1 | 354 | | | | | | | | | |
| Actinomyces sp. oral taxon 180 | SEQ ID NO: | 183 | 228 | 46 | 349 | 409 | 40 | 349 | 409 | 40 |
| str. F0310 | 355 | | | | | | | | | |
| gi\|315605738\|ref\|ZP_07880770.1 | | | | | | | | | | |
| Alcanivorax sp. W11-5 | SEQ ID NO: | 139 | 183 | 45 | 344 | 404 | 61 | 344 | 404 | 61 |
| gi\|407803669\|ref\|ZP_11150502.1 | 356 | | | | | | | | | |
| Aminomonas paucivorans DSM | SEQ ID NO: | 134 | 178 | 45 | 341 | 401 | 63 | 341 | 401 | 63 |
| 12260 | 357 | | | | | | | | | |
| gi\|312879015\|ref\|ZP_07738815.1 | | | | | | | | | | |
| Mycoplasma canis PG 14 | SEQ ID NO: | 139 | 183 | 45 | 319 | 379 | 76 | 319 | 379 | 76 |
| gi\|384393286\|gb\|EIE39736.1\| | 358 | | | | | | | | | |
| Lactobacillus coryniformis | SEQ ID NO: | 141 | 184 | 44 | 328 | 387 | 61 | 328 | 387 | 61 |
| KCTC 3535 | 359 | | | | | | | | | |
| gi\|336393381\|ref\|ZP_08574780.1 | | | | | | | | | | |
| Elusimicrobium minutum Pei191 | SEQ ID NO: | 177 | 219 | 43 | 322 | 381 | 47 | 322 | 381 | 47 |
| gi\|187250660\|ref\|YP_001875142.1 | 360 | | | | | | | | | |
| Neisseria meningitidis Z2491 | SEQ ID NO: | 147 | 189 | 43 | 360 | 419 | 61 | 360 | 419 | 61 |
| gi\|218767588\|ref\|YP_002342100.1 | 361 | | | | | | | | | |
| Pasteurella multocida str. Pm70 | SEQ ID NO: | 139 | 181 | 43 | 319 | 378 | 61 | 319 | 378 | 61 |
| gi\|15602992\|ref\|NP_246064.1\| | 362 | | | | | | | | | |
| Rhodovulum sp. PH10 | SEQ ID NO: | 141 | 183 | 43 | 319 | 378 | 48 | 319 | 378 | 48 |
| gi\|402849997\|ref\|ZP_10898214.1 | 363 | | | | | | | | | |
| Eubacterium dolichum DSM | SEQ ID NO: | 131 | 172 | 42 | 303 | 361 | 59 | 303 | 361 | 59 |
| 3991 | 364 | | | | | | | | | |
| gi\|160915782\|ref\|ZP_02077990.1 | | | | | | | | | | |
| Nitratifractor salsuginis DSM | SEQ ID NO: | 143 | 184 | 42 | 347 | 404 | 61 | 347 | 404 | 61 |
| 16511 | 365 | | | | | | | | | |
| gi\|319957206\|ref\|YP_004168469.1 | | | | | | | | | | |
| Rhodospirillum rubrum ATCC | SEQ ID NO: | 139 | 180 | 42 | 314 | 371 | 55 | 314 | 371 | 55 |
| 11170 | 366 | | | | | | | | | |
| gi\|83591793\|ref\|YP_425545.1\| | | | | | | | | | | |
| Clostridium cellulolyticum H10 | SEQ ID NO: | 137 | 176 | 40 | 320 | 376 | 61 | 320 | 376 | 61 |
| gi\|220930482\|ref\|YP_002507391.1 | 367 | | | | | | | | | |
| Helicobacter mustelae 12198 | SEQ ID NO: | 148 | 187 | 40 | 298 | 354 | 48 | 298 | 354 | 48 |
| gi\|291276265\|ref\|YP_003516037.1 | 368 | | | | | | | | | |
| Ilyobacter polytropus DSM 2926 | SEQ ID NO: | 134 | 173 | 40 | 462 | 517 | 63 | 462 | 517 | 63 |
| gi\|310780384\|ref\|YP_003968716.1 | 369 | | | | | | | | | |
| Sphaerochaeta globus str. Buddy | SEQ ID NO: | 163 | 202 | 40 | 335 | 389 | 45 | 335 | 389 | 45 |
| gi\|325972003\|ref\|YP_004248194.1 | 370 | | | | | | | | | |
| Staphylococcus lugdunensis | SEQ ID NO: | 128 | 167 | 40 | 337 | 391 | 57 | 337 | 391 | 57 |
| M23590 | 371 | | | | | | | | | |
| gi\|315659848\|ref\|ZP_07912707.1 | | | | | | | | | | |
| Treponema sp. JC4 | SEQ ID NO: | 144 | 183 | 40 | 328 | 382 | 63 | 328 | 382 | 63 |
| gi\|384109266\|ref\|ZP_10010146.1 | 372 | | | | | | | | | |
| uncultured delta proteobacterium | SEQ ID NO: | 154 | 193 | 40 | 313 | 365 | 55 | 313 | 365 | 55 |
| HF0070 07E19 | 373 | | | | | | | | | |
| gi\|297182908\|gb\|ADI19058.1\| | | | | | | | | | | |
| Alicycliphilus denitrificans K601 | SEQ ID NO: | 140 | 178 | 39 | 317 | 366 | 48 | 317 | 366 | 48 |
| gi\|330822845\|ref\|YP_004386148.1 | 374 | | | | | | | | | |
| Azospirillum sp. B510 | SEQ ID NO: | 205 | 243 | 39 | 342 | 389 | 46 | 342 | 389 | 46 |
| gi\|288957741\|ref\|YP_003448082.1 | 375 | | | | | | | | | |
| Bradyrhizobium sp. BTAi1 | SEQ ID NO: | 143 | 181 | 39 | 323 | 370 | 48 | 323 | 370 | 48 |
| gi\|148255343\|ref\|YP_001239928.1 | 376 | | | | | | | | | |
| Parvibaculum lavamentivorans | SEQ ID NO: | 138 | 176 | 39 | 327 | 374 | 58 | 327 | 374 | 58 |
| DS-1 | 377 | | | | | | | | | |
| gi\|154250555\|ref\|YP_001411379.1 | | | | | | | | | | |
| Prevotella timonensis CRIS 5C- | SEQ ID NO: | 170 | 208 | 39 | 328 | 375 | 61 | 328 | 375 | 61 |
| B1 | 378 | | | | | | | | | |
| gi\|282880052\|ref\|ZP_06288774.1 | | | | | | | | | | |
| Bacillus smithii 7 3 47FAA | SEQ ID NO: | 134 | 171 | 38 | 401 | 448 | 63 | 401 | 448 | 63 |
| gi\|365156657\|ref\|ZP_09352959.1 | 379 | | | | | | | | | |
| Cand. Puniceispirillum marinum | SEQ ID NO: | 135 | 172 | 38 | 344 | 391 | 53 | 344 | 391 | 53 |
| IMCC1322 | 380 | | | | | | | | | |
| gi\|294086111\|ref\|YP_003552871.1 | | | | | | | | | | |
| Barnesiella intestinihominis YIT | SEQ ID NO: | 140 | 176 | 37 | 371 | 417 | 60 | 371 | 417 | 60 |
| 11860 | 381 | | | | | | | | | |
| gi\|404487228\|ref\|ZP_11022414.1 | | | | | | | | | | |
| Ralstonia syzygii R24 | SEQ ID NO: | 140 | 176 | 37 | 395 | 440 | 50 | 395 | 440 | 50 |
| gi\|344171927\|emb\|CCA84553.1\| | 382 | | | | | | | | | |
| Wolinella succinogenes DSM | SEQ ID NO: | 145 | 180 | 36 | 348 | 392 | 60 | 348 | 392 | 60 |
| 1740 | 383 | | | | | | | | | |
| gi\|34557790\|ref\|NP_907605.1\| | | | | | | | | | | |
| Mycoplasma gallisepticum str. F | SEQ ID NO: | 144 | 177 | 34 | 373 | 416 | 71 | 373 | 416 | 71 |
| gi\|284931710\|gb\|ADC31648.1\| | 384 | | | | | | | | | |
| Acidothermus cellulolyticus 11B | SEQ ID NO: | 150 | 182 | 33 | 341 | 380 | 58 | 341 | 380 | 58 |
| gi\|117929158\|ref\|YP_873709.1\| | 385 | | | | | | | | | |
| Mycoplasma ovipneumoniae | SEQ ID NO: | 156 | 184 | 29 | 381 | 420 | 62 | 381 | 420 | 62 |
| SC01 | 386 | | | | | | | | | |
| gi\|363542550\|ref\|ZP_09312133.1 | | | | | | | | | | |

TABLE 8
Amino Acid Sequence of Cas9 Core Domains

| | |
|---|---|
| Cas9 Start | Cas9 Stop |
| (AA pos) | (AA pos) |

| | |
|---|---|
| | Start and Stop numbers refer to the |
| Strain Name | sequence in Table 7 |

| | | |
|---|---|---|
| Staphylococcus Aureus | 1 | 772 |
| Streptococcus Pyogenes | 1 | 1099 |
| Campulobacter Jejuni | 1 | 741 |

TABLE 9
Identified PAM sequences and corresponding RKR motifs.

| | PAM sequence | RKR motif |
|---|---|---|
| Strain Name | (NA) | (AA) |
| Streptococcus pyogenes | NGG | RKR |
| Streptococcus mutans | NGG | RKR |
| Streptococcus thermophilus A | NGGNG | RYR |
| Treponema denticola | NAAAAN | VAK |
| Streptococcus thermophilus B | NNAAAAW | IYK |
| Campylobacter jejuni | NNNNACA | NLK |
| Pasteurella multocida | GNNNCNNA | KDG |
| Neisseria meningitidis | NNNNGATT or | IGK |
| Staphylococcus aureus | NNGRRV (R = A or G; | NDK |
| | V = A, G or C) | |
| | NNGRRT (R = A or G) | |

[1027] PI domains are provided in Tables 10 and 11.

TABLE 10
Altered PI Domains

| | PI Start | PI Stop | | |
|---|---|---|---|---|
| | (AA pos) | (AA pos) | | |
| | Start and Stop numbers | | | |
| | refer to the sequences | | Length of | RKR motif |
| Strain Name | in Table 100 | | PI (AA) | (AA) |
| Alicycliphilus denitrificans K601 | 837 | 1029 | 193 | ——Y |
| Campylobacter jejuni NCTC 11168 | 741 | 984 | 244 | —NG |
| Helicobacter mustelae 12198 | 771 | 1024 | 254 | —NQ |

TABLE 11
Other Altered PI Domains

| | PI Start | PI Stop | | |
|---|---|---|---|---|
| | (AA pos) | (AA pos) | | |
| | Start and Stop numbers | | | |
| | refer to the sequences | | Length of | RKR motif |
| Strain Name | in Table 7 | | PI (AA) | (AA) |
| Akkermansia muciniphila ATCC BAA-835 | 871 | 1101 | 231 | ALK |
| Ralstonia syzygii R24 | 821 | 1062 | 242 | APY |
| Cand. Puniceispirillum marinum IMCC1322 | 815 | 1035 | 221 | AYK |
| Fructobacillus fructosus KCTC 3544 | 1074 | 1323 | 250 | DGN |
| Eubacterium yurii ATCC 43715 | 1107 | 1391 | 285 | DGY |
| Eubacterium dolichum DSM 3991 | 779 | 1096 | 318 | DKK |
| Dinoroseobacter shibae DFL 12 | 851 | 1079 | 229 | DPI |
| Clostridium cellulolyticum H10 | 767 | 1021 | 255 | EGK |
| Pasteurella multocida str. Pm70 | 815 | 1056 | 242 | ENN |
| Mycoplasma canis PG 14 | 907 | 1233 | 327 | EPK |
| Porphyromonas sp. oral taxon 279 str. F0450 | 935 | 1197 | 263 | EPT |
| Filifactor alocis ATCC 35896 | 1094 | 1365 | 272 | EVD |
| Aminomonas paucivorans DSM 12260 | 801 | 1052 | 252 | EVY |
| Wolinella succinogenes DSM 1740 | 1034 | 1409 | 376 | EYK |
| Oenococcus kitaharae DSM 17330 | 1119 | 1389 | 271 | GAL |
| Coriobacterium glomerans PW2 | 1126 | 1384 | 259 | GDR |
| Peptoniphilus duerdenii ATCC BAA-1640 | 1091 | 1364 | 274 | GDS |
| Bifidobacterium bifidum S17 | 1138 | 1420 | 283 | GGL |
| Alicyclobacillus hesperidum URH17-3-68 | 876 | 1146 | 271 | GGR |
| Roseburia inulinivorans DSM 16841 | 895 | 1152 | 258 | GGT |
| Actinomyces coleocanis DSM 15436 | 843 | 1105 | 263 | GKK |
| Odoribacter laneus YIT 12061 | 1103 | 1498 | 396 | GKV |
| Coprococcus catus GD-7 | 1063 | 1338 | 276 | GNQ |
| Enterococcus faecalis TX0012 | 829 | 1150 | 322 | GRK |
| Bacillus smithii 7 3 47FAA | 809 | 1088 | 280 | GSK |
| Legionella pneumophila str. Paris | 1021 | 1372 | 352 | GTM |
| Bacteroides fragilis NCTC 9343 | 1140 | 1436 | 297 | IPV |
| Mycoplasma ovipneumoniae SC01 | 923 | 1265 | 343 | IRI |
| Actinomyces sp. oral taxon 180 str. F0310 | 895 | 1181 | 287 | KEK |
| Treponema sp. JC4 | 832 | 1062 | 231 | KIS |
| Fusobacterium nucleatum ATCC49256 | 1073 | 1374 | 302 | KKV |
| Lactobacillus farciminis KCTC 3681 | 1101 | 1356 | 256 | KKV |
| Nitratifractor salsuginis DSM 16511 | 840 | 1132 | 293 | KMR |
| Lactobacillus coryniformis KCTC 3535 | 850 | 1119 | 270 | KNK |
| Mycoplasma mobile 163K | 916 | 1236 | 321 | KNY |
| Flavobacterium branchiophilum FL-15 | 1182 | 1473 | 292 | KQK |
| Prevotella timonensis CRIS 5C-B1 | 957 | 1218 | 262 | KQQ |
| Methylosinus trichosporium OB3b | 830 | 1082 | 253 | KRP |
| Prevotella sp. C561 | 1099 | 1424 | 326 | KRY |
| Mycoplasma gallisepticum str. F | 911 | 1269 | 359 | KTA |
| Lactobacillus rhamnosus GG | 1077 | 1363 | 287 | KYG |
| Wolinella succinogenes DSM 1740 | 811 | 1059 | 249 | LPN |
| Streptococcus thermophilus LMD-9 | 1099 | 1388 | 290 | MLA |
| Treponema denticola ATCC 35405 | 1092 | 1395 | 304 | NDS |
| Bergeyella zoohelcum ATCC 43767 | 1098 | 1415 | 318 | NEK |
| Veillonella atypica ACS-134-V-Col7a | 1107 | 1398 | 292 | NGF |
| Neisseria meningitidis Z2491 | 835 | 1082 | 248 | NHN |
| Ignavibacterium album JCM 16511 | 1296 | 1688 | 393 | NKK |
| Ruminococcus albus 8 | 853 | 1156 | 304 | NNF |
| Streptococcus thermophilus LMD-9 | 811 | 1121 | 311 | NNK |
| Barnesiella intestinihominis YIT 11860 | 871 | 1153 | 283 | NPV |
| Azospirillum sp. B510 | 911 | 1168 | 258 | PFH |
| Rhodospirillum rubrum ATCC 11170 | 863 | 1173 | 311 | PRG |
| Planococcus antarcticus DSM 14505 | 1087 | 1333 | 247 | PYY |
| Staphylococcus pseudintermedius ED99 | 1073 | 1334 | 262 | QIV |
| Alcanivorax sp. W11-5 | 843 | 1113 | 271 | RIE |
| Bradyrhizobium sp. BTAi1 | 811 | 1064 | 254 | RIY |
| Streptococcus pyogenes M1 GAS | 1099 | 1368 | 270 | RKR |
| Streptococcus mutans UA159 | 1078 | 1345 | 268 | RKR |
| Streptococcus Pyogenes | 1099 | 1368 | 270 | RKR |
| Bacteroides sp. 20 3 | 1147 | 1517 | 371 | RNI |
| S. aureus | 772 | 1053 | 282 | RNK |
| Solobacterium moorei F0204 | 1062 | 1327 | 266 | RSG |
| Finegoldia magna ATCC 29328 | 1081 | 1348 | 268 | RTE |
| uncultured delta proteobacterium HF0070 07E19 | 770 | 1011 | 242 | SGG |
| Acidaminococcus sp. D21 | 1064 | 1358 | 295 | SIG |
| Eubacterium rectale ATCC 33656 | 824 | 1114 | 291 | SKK |
| Caenispirillum salinarum AK4 | 1048 | 1442 | 395 | SLV |
| Acidothermus cellulolyticus 11B | 830 | 1138 | 309 | SPS |
| Catenibacterium mitsuokai DSM 15897 | 1068 | 1329 | 262 | SPT |
| Parvibaculum lavamentivorans DS-1 | 827 | 1037 | 211 | TGN |
| Staphylococcus lugdunensis M23590 | 772 | 1054 | 283 | TKK |
| Streptococcus sanguinis SK49 | 1123 | 1421 | 299 | TRM |
| Elusimicrobium minutum Pei191 | 910 | 1195 | 286 | TTG |
| Nitrobacter hamburgensis X14 | 914 | 1166 | 253 | VAY |
| Mycoplasma synoviae 53 | 991 | 1314 | 324 | VGF |
| Sphaerochaeta globus str. Buddy | 877 | 1179 | 303 | VKG |
| Ilyobacter polytropus DSM 2926 | 837 | 1092 | 256 | VNG |
| Rhodovulum sp. PH10 | 821 | 1059 | 239 | VPY |
| Bifidobacterium longum DJO10A | 904 | 1187 | 284 | VRK |

[1028] Amino acid sequences described in Table 7 (in order of appearance):

SEQ ID NO: 304
MKRNYILGLDIGITSVGYGIIDYETRDVIDAGVRLFKEANVENNEGRRSKRGARRLKRRRRHRI
QRVKKLLFDYNLLTDHSELSGINPYEARVKGLSQKLSEEEFSAALLHLAKRRGVHNVNEVEEDT
GNELSTKEQISRNSKALEEKYVAELQLERLKKDGEVRGSINRFKTSDYVKEAKQLLKVQKAYHQ
LDQSFIDTYIDLLETRRTYYEGPGEGSPFGWKDIKEWYEMLMGHCTYFPEELRSVKYAYNADLY
NALNDLNNLVITRDENEKLEYYEKFQIIENVFKQKKKPTLKQIAKEILVNEEDIKGYRVTSTGK
PEFTNLKVYHDIKDITARKEIIENAELLDQIAKILTIYQSSEDIQEELTNLNSELTQEEIEQIS
NLKGYTGTHNLSLKAINLILDELWHTNDNQIAIFNRLKLVPKKVDLSQQKEIPTTLVDDFILSP
VVKRSFIQSIKVINAIIKKYGLPNDIIIELAREKNSKDAQKMINEMQKRNRQTNERIEEIIRTT
GKENAKYLIEKIKLHDMQEGKCLYSLEAIPLEDLLNNPFNYEVDHIIPRSVSFDNSFNNKVLVK
QEENSKKGNRTPFQYLSSSDSKISYETFKKHILNLAKGKGRISKTKKEYLLEERDINRFSVQKD
FINRNLVDTRYATRGLMNLLRSYFRVNNLDVKVKSINGGFTSFLRRKWKFKKERNKGYKHHAED
ALIIANADFIFKEWKKLDKAKKVMENQMFEEKQAESMPEIETEQEYKEIFITPHQIKHIKDFKD
YKYSHRVDKKPNRELINDTLYSTRKDDKGNTLIVNNLNGLYDKDNDKLKKLINKSPEKLLMYHH
DPQTYQKLKLIMEQYGDEKNPLYKYYEETGNYLTKYSKKDNGPVIKKIKYYGNKLNAHLDITDD
YPNSRNKVVKLSLKPYRFDVYLDNGVYKFVTVKNLDVIKKENYYEVNSKCYEEAKKLKKISNQA
EFIASFYNNDLIKINGELYRVIGVNNDLLNRIEVNMIDITYREYLENMNDKRPPRIIKTIASKT
QSIKKYSTDILGNLYEVKSKKHPQIIKKG
SEQ ID NO: 305
[sequence omitted]
SEQ ID NO: 306
MARILAFDIGISSIGWAFSENDELKDCGVRIFTKVENPKTGESLALPRRLARSARKRLARRKAR
LNHLKHLIANEFKLNYEDYQSFDESLAKAYKGSLISPYELRFRALNELLSKQDFARVILHIAKR
RGYDDIKNSDDKEKGAILKAIKQNEEKLANYQSVGEYLYKEYFQKFKENSKEFTNVRNKKESYE
RCIAQSFLKDELKLIFKKQREFGFSFSKKFEEEVLSVAFYKRALKDFSHLVGNCSFFTDEKRAP
KNSPLAFMFVALTRIINLLNNLKNTEGILYTKDDLNALLNEVLKNGTLTYKQTKKLLGLSDDYE
FKGEKGTYFIEFKKYKEFIKALGEHNLSQDDLNEIAKDITLIKDEIKLKKALAKYDLNQNQIDS
LSKLEFKDHLNISFKALKLVTPLMLEGKKYDEACNELNLKVAINEDKKDFLPAFNETYYKDEVT
NPVVLRAIKEYRKVLNALLKKYGKVHKINIELAREVGKNHSQRAKIEKEQNENYKAKKDAELEC
EKLGLKINSKNILKLRLFKEQKEFCAYSGEKIKISDLQDEKMLEIDHIYPYSRSFDDSYMNKVL
VFTKQNQEKLNQTPFEAFGNDSAKWQKIEVLAKNLPTKKQKRILDKNYKDKEQKNFKDRNLNDT
RYIARLVLNYTKDYLDFLPLSDDENTKLNDTQKGSKVHVEAKSGMLTSALRHTWGFSAKDRNNH
LHHAIDAVIIAYANNSIVKAFSDFKKEQESNSAELYAKKISELDYKNKRKFFEPFSGFRQKVLD
KIDEIFVSKPERKKPSGALHEETFRKEEEFYQSYGGKEGVLKALELGKIRKVNGKIVKNGDMFR
VDIFKHKKTNKFYAVPIYTMDFALKVLPNKAVARSKKGEIKDWILMDENYEFCFSLYKDSLILI
QTKDMQEPEFVYYNAFTSSTVSLIVSKHDNKFETLSKNQKILFKNANEKEVIAKSIGIQNLKVF
EKYIVSALGEVTKAEFRQREDFKK
SEQ ID NO: 307
MKRILGLDLGTNSIGWALVNEAENKDERSSIVKLGVRVNPLTVDELTNFEKGKSITTNADRTLK
RGMRRNLQRYKLRRETLTEVLKEHKLITEDTILSENGNRTTFETYRLRAKAVTEEISLEEFARV
LLMINKKRGYKSSRKAKGVEEGTLIDGMDIARELYNNNLTPGELCLQLLDAGKKFLPDFYRSDL
QNELDRIWEKQKEYYPEILTDVLKEELRGKKRDAVWAICAKYFVWKENYTEWNKEKGKTEQQER
EHKLEGIYSKRKRDEAKRENLQWRVNGLKEKLSLEQLVIVFQEMNTQINNSSGYLGAISDRSKE
LYFNKQTVGQYQMEMLDKNPNASLRNMVFYRQDYLDEFNMLWEKQAVYHKELTEELKKEIRDII
IFYQRRLKSQKGLIGFCEFESRQIEVDIDGKKKIKTVGNRVISRSSPLFQEFKIWQILNNIEVT
VVGKKRKRRKLKENYSALFEELNDAEQLELNGSRRLCQEEKELLAQELFIRDKMTKSEVLKLLF
DNPQELDLNFKTIDGNKTGYALFQAYSKMIEMSGHEPVDFKKPVEKVVEYIKAVFDLLNWNTDI
LGFNSNEELDNQPYYKLWHLLYSFEGDNTPTGNGRLIQKMTELYGFEKEYATILANVSFQDDYG
SLSAKAIHKILPHLKEGNRYDVACVYAGYRHSESSLTREEIANKVLKDRLMLLPKNSLHNPVVE
KILNQMVNVINVIIDIYGKPDEIRVELARELKKNAKEREELTKSIAQTTKAHEEYKTLLQTEFG
LTNVSRTDILRYKLYKELESCGYKTLYSNTYISREKLFSKEFDIEHIIPQARLFDDSFSNKTLE
ARSVNIEKGNKTAYDFVKEKFGESGADNSLEHYLNNIEDLFKSGKISKTKYNKLKMAEQDIPDG
FIERDLRNTQYIAKKALSMLNEISHRVVATSGSVTDKLREDWQLIDVMKELNWEKYKALGLVEY
FEDRDGRQIGRIKDWTKRNDHRHHAMDALTVAFTKDVFIQYFNNKNASLDPNANEHAIKNKYFQ
NGRAIAPMPLREFRAEAKKHLENTLISIKAKNKVITGNINKTRKKGGVNKNMQQTPRGQLHLET
IYGSGKQYLTKEEKVNASFDMRKIGTVSKSAYRDALLKRLYENDNDPKKAFAGKNSLDKQPIWL
DKEQMRKVPEKVKIVTLEAIYTIRKEISPDLKVDKVIDVGVRKILIDRLNEYGNDAKKAFSNLD
KNPIWLNKEKGISIKRVTISGISNAQSLHVKKDKDGKPILDENGRNIPVDFVNTGNNHHVAVYY
RPVIDKRGQLVVDEAGNPKYELEEVVVSFFEAVTRANLGLPIIDKDYKTTEGWQFLFSMKQNEY
FVFPNEKTGFNPKEIDLLDVENYGLISPNLFRVQKFSLKNYVFRHHLETTIKDTSSILRGITWI
DFRSSKGLDTIVKVRVNHIGQIVSVGEY
SEQ ID NO: 308
MSRKNYVDDYAISLDIGNASVGWSAFTPNYRLVRAKGHELIGVRLFDPADTAESRRMARTTRRR
YSRRRWRLRLLDALFDQALSEIDPSFLARRKYSWVHPDDENNADCWYGSVLFDSNEQDKRFYEK
YPTIYHLRKALMEDDSQHDIREIYLAIHHMVKYRGNFLVEGTLESSNAFKEDELLKLLGRITRY
EMSEGEQNSDIEQDDENKLVAPANGQLADALCATRGSRSMRVDNALEALSAVNDLSREQRAIVK
AIFAGLEGNKLDLAKIFVSKEFSSENKKILGIYFNKSDYEEKCVQIVDSGLLDDEEREFLDRMQ
GQYNAIALKQLLGRSTSVSDSKCASYDAHRANWNLIKLQLRTKENEKDINENYGILVGWKIDSG
QRKSVRGESAYENMRKKANVFFKKMIETSDLSETDKNRLIHDIEEDKLFPIQRDSDNGVIPHQL
HQNELKQIIKKQGKYYPFLLDAFEKDGKQINKIEGLLTFRVPYFVGPLVVPEDLQKSDNSENHW
MVRKKKGEITPWNFDEMVDKDASGRKFIERLVGTDSYLLGEPTLPKNSLLYQEYEVLNELNNVR
LSVRTGNHWNDKRRMRLGREEKTLLCQRLFMKGQTVTKRTAENLLRKEYGRTYELSGLSDESKF
TSSLSTYGKMCRIFGEKYVNEHRDLMEKIVELQTVFEDKETLLHQLRQLEGISEADCALLVNTH
YTGWGRLSRKLLTTKAGECKISDDFAPRKHSIIEIMRAEDRNLMEIITDKQLGFSDWIEQENLG
AENGSSLMEVVDDLRVSPKVKRGIIQSIRLIDDISKAVGKRPSRIFLELADDIQPSGRTISRKS
RLQDLYRNANLGKEFKGIADELNACSDKDLQDDRLFLYYTQLGKDMYTGEELDLDRLSSAYDID
HIIPQAVTQNDSIDNRVLVARAENARKTDSFTYMPQIADRMRNFWQILLDNGLISRVKFERLTR
QNEFSEREKERFVQRSLVETRQIMKNVATLMRQRYGNSAAVIGLNAELTKEMHRYLGFSHKNRD
INDYHHAQDALCVGIAGQFAANRGFFADGEVSDGAQNSYNQYLRDYLRGYREKLSAEDRKQGRA
FGFIVGSMRSQDEQKRVNPRTGEVVWSEEDKDYLRKVMNYRKMLVTQKVGDDFGALYDETRYAA
TDPKGIKGIPFDGAKQDTSLYGGFSSAKPAYAVLIESKGKTRLVNVTMQEYSLLGDRPSDDELR
KVLAKKKSEYAKANILLRHVPKMQLIRYGGGLMVIKSAGELNNAQQLWLPYEEYCYFDDLSQGK
GSLEKDDLKKLLDSILGSVQCLYPWHRFTEEELADLHVAFDKLPEDEKKNVITGIVSALHADAK
TANLSIVGMTGSWRRMNNKSGYTFSDEDEFIFQSPSGLFEKRVTVGELKRKAKKEVNSKYRTNE
KRLPTLSGASQP
SEQ ID NO: 309
METQTSNQLITSHLKDYPKQDYFVGLDIGTNSVGWAVTNTSYELLKFHSHKMWGSRLFEEGESA
VTRRGFRSMRRRLERRKLRLKLLEELFADAMAQVDSTFFIRLHESKYHYEDKTTGHSSKHILFI
DEDYTDQDYFTEYPTIYHLRKDLMENGTDDIRKLFLAVHHILKYRGNFLYEGATFNSNAFTFED
VLKQALVNITFNCFDTNSAISSISNILMESGKTKSDKAKAIERLVDTYTVFDEVNTPDKPQKEQ
VKEDKKTLKAFANLVLGLSANLIDLFGSVEDIDDDLKKLQIVGDTYDEKRDELAKVWGDEIHII
DDCKSVYDAIILMSIKEPGLTISQSKVKAFDKHKEDLVILKSLLKLDRNVYNEMFKSDKKGLHN
YVHYIKQGRTEETSCSREDFYKYTKKIVEGLADSKDKEYILNEIELQTLLPLQRIKDNGVIPYQ
LHLEELKVILDKCGPKFPFLHTVSDGFSVTEKLIKMLEFRIPYYVGPLNTHHNIDNGGFSWAVR
KQAGRVTPWNFEEKIDREKSAAAFIKNLTNKCTYLFGEDVLPKSSLLYSEFMLLNELNNVRIDG
KALAQGVKQHLIDSIFKQDHKKMTKNRIELFLKDNNYITKKHKPEITGLDGEIKNDLTSYRDMV
RILGNNFDVSMAEDIITDITIFGESKKMLRQTLRNKFGSQLNDETIKKLSKLRYRDWGRLSKKL
LKGIDGCDKAGNGAPKTIIELMRNDSYNLMEILGDKFSFMECIEEENAKLAQGQVVNPHDIIDE
LALSPAVKRAVWQALRIVDEVAHIKKALPSRIFVEVARTNKSEKKKKDSRQKRLSDLYSAIKKD
DVLQSGLQDKEFGALKSGLANYDDAALRSKKLYLYYTQMGRCAYTGNIIDLNQLNTDNYDIDHI
YPRSLTKDDSFDNLVLCERTANAKKSDIYPIDNRIQTKQKPFWAFLKHQGLISERKYERLTRIA
PLTADDLSGFIARQLVETNQSVKATTTLLRRLYPDIDVVFVKAENVSDFRHNNNFIKVRSLNHH
HHAKDAYLNIVVGNVYHEKFTRNFRLFFKKNGANRTYNLAKMFNYDVICTNAQDGKAWDVKTSM
NTVKKMMASNDVRVTRRLLEQSGALADATIYKASVAAKAKDGAYIGMKTKYSVFADVTKYGGMT
KIKNAYSIIVQYTGKKGEEIKEIVPLPIYLINRNATDIELIDYVKSVIPKAKDISIKYRKLCIN
QLVKVNGFYYYLGGKTNDKIYIDNAIELVVPHDIATYIKLLDKYDLLRKENKTLKASSITTSIY
NINTSTVVSLNKVGIDVFDYFMSKLRTPLYMKMKGNKVDELSSTGRSKFIKMTLEEQSIYLLEV
LNLLTNSKTTFDVKPLGITGSRSTIGVKIHNLDEFKIINESITGLYSNEVTIV
SEQ ID NO: 310
MTKLNQPYGIGLDIGSNSIGFAVVDANSHLLRLKGETAIGARLFREGQSAADRRGSRTTRRRLS
RTRWRLSFLRDFFAPHITKIDPDFFLRQKYSEISPKDKDRFKYEKRLFNDRTDAEFYEDYPSMY
HLRLHLMTHTHKADPREIFLAIHHILKSRGHFLTPGAAKDFNTDKVDLEDIFPALTEAYAQVYP
DLELTFDLAKADDFKAKLLDEQATPSDTQKALVNLLLSSDGEKEIVKKRKQVLTEFAKAITGLK
TKFNLALGTEVDEADASNWQFSMGQLDDKWSNIETSMTDQGTEIFEQIQELYRARLLNGIVPAG
MSLSQAKVADYGQHKEDLELFKTYLKKLNDHELAKTIRGLYDRYINGDDAKPFLREDFVKALTK
EVTAHPNEVSEQLLNRMGQANFMLKQRTKANGAIPIQLQQRELDQIIANQSKYYDWLAAPNPVE
AHRWKMPYQLDELLNFHIPYYVGPLITPKQQAESGENVFAWMVRKDPSGNITPYNFDEKVDREA
SANTFIQRMKTTDTYLIGEDVLPKQSLLYQKYEVLNELNNVRINNECLGTDQKQRLIREVFERH
SSVTIKQVADNLVAHGDFARRPEIRGLADEKRFLSSLSTYHQLKEILHEAIDDPTKLLDIENII
TWSTVFEDHTIFETKLAEIEWLDPKKINELSGIRYRGWGQFSRKLLDGLKLGNGHTVIQELMLS
NHNLMQILADETLKETMTELNQDKLKTDDIEDVINDAYTSPSNKKALRQVLRVVEDIKHAANGQ
DPSWLFIETADGTGTAGKRTQSRQKQIQTVYANAAQELIDSAVRGELEDKIADKASFTDRLVLY
FMQGGRDIYTGAPLNIDQLSHYDIDHILPQSLIKDDSLDNRVLVNATINREKNNVFASTLFAGK
MKATWRKWHEAGLISGRKLRNLMLRPDEIDKFAKGFVARQLVETRQIIKLTEQIAAAQYPNTKI
IAVKAGLSHQLREELDFPKNRDVNHYHHAFDAFLAARIGTYLLKRYPKLAPFFTYGEFAKVDVK
KFREFNFIGALTHAKKNIIAKDTGEIVWDKERDIRELDRIYNFKRMLITHEVYFETADLFKQTI
YAAKDSKERGGSKQLIPKKQGYPTQVYGGYTQESGSYNALVRVAEADTTAYQVIKISAQNASKI
ASANLKSREKGKQLLNEIVVKQLAKRRKNWKPSANSFKIVIPRFGMGTLFQNAKYGLFMVNSDT
YYRNYQELWLSRENQKLLKKLFSIKYEKTQMNHDALQVYKAIIDQVEKFFKLYDINQFRAKLSD
AIERFEKLPINTDGNKIGKTETLRQILIGLQANGTRSNVKNLGIKTDLGLLQVGSGIKLDKDTQ
IVYQSPSGLFKRRIPLADL
SEQ ID NO: 311
MTKEYYLGLDVGTNSVGWAVTDSQYNLCKFKKKDMWGIRLFESANTAKDRRLQRGNRRRLERKK
QRIDLLQEIFSPEICKIDPTFFIRLNESRLHLEDKSNDFKYPLFIEKDYSDIEYYKEFPTIFHL
RKHLIESEEKQDIRLIYLALHNIIKTRGHFLIDGDLQSAKQLRPILDTFLLSLQEEQNLSVSLS
ENQKDEYEEILKNRSIAKSEKVKKLKNLFEISDELEKEEKKAQSAVIENFCKFIVGNKGDVCKF
LRVSKEELEIDSFSFSEGKYEDDIVKNLEEKVPEKVYLFEQMKAMYDWNILVDILETEEYISFA
KVKQYEKHKTNLRLLRDIILKYCTKDEYNRMFNDEKEAGSYTAYVGKLKKNNKKYWIEKKRNPE
EFYKSLGKLLDKIEPLKEDLEVLTMMIEECKNHTLLPIQKNKDNGVIPHQVHEVELKKILENAK
KYYSFLTETDKDGYSVVQKIESIFRFRIPYYVGPLSTRHQEKGSNVWMVRKPGREDRIYPWNME
EIIDFEKSNENFITRMTNKCTYLIGEDVLPKHSLLYSKYMVLNELNNVKVRGKKLPTSLKQKVF
EDLFENKSKVTGKNLLEYLQIQDKDIQIDDLSGFDKDFKTSLKSYLDFKKQIFGEEIEKESIQN
MIEDIIKWITIYGNDKEMLKRVIRANYSNQLTEEQMKKITGFQYSGWGNFSKMFLKGISGSDVS
TGETFDIITAMWETDNNLMQILSKKFTFMDNVEDFNSGKVGKIDKITYDSTVKEMFLSPENKRA
VWQTIQVAEEIKKVMGCEPKKIFIEMARGGEKVKKRTKSRKAQLLELYAACEEDCRELIKEIED
RDERDFNSMKLFLYYTQFGKCMYSGDDIDINELIRGNSKWDRDHIYPQSKIKDDSIDNLVLVNK
TYNAKKSNELLSEDIQKKMHSFWLSLLNKKLITKSKYDRLTRKGDFTDEELSGFIARQLVETRQ
STKAIADIFKQIYSSEVVYVKSSLVSDFRKKPLNYLKSRRVNDYHHAKDAYLNIVVGNVYNKKF
TSNPIQWMKKNRDTNYSLNKVFEHDVVINGEVIWEKCTYHEDTNTYDGGTLDRIRKIVERDNIL
YTEYAYCEKGELFNATIQNKNGNSTVSLKKGLDVKKYGGYFSANTSYFSLIEFEDKKGDRARHI
IGVPIYIANMLEHSPSAFLEYCEQKGYQNVRILVEKIKKNSLLIINGYPLRIRGENEVDTSFKR
AIQLKLDQKNYELVRNIEKFLEKYVEKKGNYPIDENRDHITHEKMNQLYEVLLSKMKKFNKKGM
ADPSDRIEKSKPKFIKLEDLIDKINVINKMLNLLRCDNDTKADLSLIELPKNAGSFVVKKNTIG
KSKIILVNQSVTGLYENRREL
SEQ ID NO: 312
MARDYSVGLDIGTSSVGWAAIDNKYHLIRAKSKNLIGVRLFDSAVTAEKRRGYRTTRRRLSRRH
WRLRLLNDIFAGPLTDFGDENFLARLKYSWVHPQDQSNQAHFAAGLLFDSKEQDKDFYRKYPTI
YHLRLALMNDDQKHDLREVYLAIHHLVKYRGHFLIEGDVKADSAFDVHTFADAIQRYAESNNSD
ENLLGKIDEKKLSAALTDKHGSKSQRAETAETAFDILDLQSKKQIQAILKSVVGNQANLMAIFG
LDSSAISKDEQKNYKFSFDDADIDEKIADSEALLSDTEFEFLCDLKAAFDGLTLKMLLGDDKTV
SAAMVRRFNEHQKDWEYIKSHIRNAKNAGNGLYEKSKKFDGINAAYLALQSDNEDDRKKAKKIF
QDEISSADIPDDVKADFLKKIDDDQFLPIQRTKNNGTIPHQLHRNELEQIIEKQGIYYPFLKDT
YQENSHELNKITALINFRVPYYVGPLVEEEQKIADDGKNIPDPTNHWMVRKSNDTITPWNLSQV
VDLDKSGRRFIERLTGTDTYLIGEPTLPKNSLLYQKFDVLQELNNIRVSGRRLDIRAKQDAFEH
LFKVQKTVSATNLKDFLVQAGYISEDTQIEGLADVNGKNFNNALTTYNYLVSVLGREFVENPSN
EELLEEITELQTVFEDKKVLRRQLDQLDGLSDHNREKLSRKHYTGWGRISKKLLTTKIVQNADK
IDNQTFDVPRMNQSIIDTLYNTKMNLMEIINNAEDDFGVRAWIDKQNTTDGDEQDVYSLIDELA
GPKEIKRGIVQSFRILDDITKAVGYAPKRVYLEFARKTQESHLTNSRKNQLSTLLKNAGLSELV
TQVSQYDAAALQNDRLYLYFLQQGKDMYSGEKLNLDNLSNYDIDHIIPQAYTKDNSLDNRVLVS
NITNRRKSDSSNYLPALIDKMRPFWSVLSKQGLLSKHKFANLTRTRDFDDMEKERFIARSLVET
RQIIKNVASLIDSHFGGETKAVAIRSSLTADMRRYVDIPKNRDINDYHHAFDALLFSTVGQYTE
NSGLMKKGQLSDSAGNQYNRYIKEWIHAARLNAQSQRVNPFGFVVGSMRNAAPGKLNPETGEIT
PEENADWSIADLDYLHKVMNFRKITVTRRLKDQKGQLYDESRYPSVLHDAKSKASINFDKHKPV
DLYGGFSSAKPAYAALIKFKNKFRLVNVLRQWTYSDKNSEDYILEQIRGKYPKAEMVLSHIPYG
QLVKKDGALVTISSATELHNFEQLWLPLADYKLINTLLKTKEDNLVDILHNRLDLPEMTIESAF
YKAFDSILSFAFNRYALHQNALVKLQAHRDDFNALNYEDKQQTLERILDALHASPASSDLKKIN
LSSGFGRLFSPSHFTLADTDEFIFQSVTGLFSTQKTVAQLYQETK
SEQ ID NO: 313
MVYDVGLDIGTGSVGWVALDENGKLARAKGKNLVGVRLFDTAQTAADRRGFRTTRRRLSRRKWR
LRLLDELFSAEINEIDSSFFQRLKYSYVHPKDEENKAHYYGGYLFPTEEETKKFHRSYPTIYHL
RQELMAQPNKRFDIREIYLAIHHLVKYRGHFLSSQEKITIGSTYNPEDLANAIEVYADEKGLSW
ELNNPEQLTEIISGEAGYGLNKSMKADEALKLFEFDNNQDKVAIKTLLAGLTGNQIDFAKLFGK
DISDKDEAKLWKLKLDDEALEEKSQTILSQLTDEEIELFHAVVQAYDGFVLIGLLNGADSVSAA
MVQLYDQHREDRKLLKSLAQKAGLKHKRFSEIYEQLALATDEATIKNGISTARELVEESNLSKE
VKEDTLRRLDENEFLPKQRTKANSVIPHQLHLAELQKILQNQGQYYPFLLDTFEKEDGQDNKIE
ELLRFRIPYYVGPLVTKKDVEHAGGDADNHWVERNEGFEKSRVTPWNFDKVFNRDKAARDFIER
LTGNDTYLIGEKTLPQNSLRYQLFTVLNELNNVRVNGKKFDSKTKADLINDLFKARKTVSLSAL
KDYLKAQGKGDVTITGLADESKFNSSLSSYNDLKKTFDAEYLENEDNQETLEKIIEIQTVFEDS
KIASRELSKLPLDDDQVKKLSQTHYTGWGRLSEKLLDSKIIDERGQKVSILDKLKSTSQNFMSI
INNDKYGVQAWITEQNTGSSKLTFDEKVNELTTSPANKRGIKQSFAVLNDIKKAMKEEPRRVYL
EFAREDQTSVRSVPRYNQLKEKYQSKSLSEEAKVLKKTLDGNKNKMSDDRYFLYFQQQGKDMYT
GRPINFERLSQDYDIDHIIPQAFTKDDSLDNRVLVSRPENARKSDSFAYTDEVQKQDGSLWTSL
LKSGFINRKKYERLTKAGKYLDGQKTGFIARQLVETRQIIKNVASLIEGEYENSKAVAIRSEIT
ADMRLLVGIKKHREINSFHHAFDALLITAAGQYMQNRYPDRDSTNVYNEFDRYTNDYLKNLRQL
SSRDEVRRLKSFGFVVGTMRKGNEDWSEENTSYLRKVMMFKNILTTKKTEKDRGPLNKETIFSP
KSGKKLIPLNSKRSDTALYGGYSNVYSAYMTLVRANGKNLLIKIPISIANQIEVGNLKINDYIV
NNPAIKKFEKILISKLPLGQLVNEDGNLIYLASNEYRHNAKQLWLSTTDADKIASISENSSDEE
LLEAYDILTSENVKNRFPFFKKDIDKLSQVRDEFLDSDKRIAVIQTILRGLQIDAAYQAPVKII
SKKVSDWHKLQQSGGIKLSDNSEMIYQSATGIFETRVKISDLL
SEQ ID NO: 314
IVDYCIGLDLGTGSVGWAVVDMNHRLMKRNGKHLWGSRLFSNAETAANRRASRSIRRRYNKRRE
RIRLLRAILQDMVLEKDPTFFIRLEHTSFLDEEDKAKYLGTDYKDNYNLFIDEDFNDYTYYHKY
PTIYHLRKALCESTEKADPRLIYLALHHIVKYRGNFLYEGQKFNMDASNIEDKLSDIFTQFTSF
NNIPYEDDEKKNLEILEILKKPLSKKAKVDEVMTLIAPEKDYKSAFKELVTGIAGNKMNVTKMI
LCEPIKQGDSEIKLKFSDSNYDDQFSEVEKDLGEYVEFVDALHNVYSWVELQTIMGATHTDNAS
ISEAMVSRYNKHHDDLKLLKDCIKNNVPNKYFDMFRNDSEKSKGYYNYINRPSKAPVDEFYKYV
KKCIEKVDTPEAKQILNDIELENFLLKQNSRTNGSVPYQMQLDEMIKIIDNQAEYYPILKEKRE
QLLSILTFRIPYYFGPLNETSEHAWIKRLEGKENQRILPWNYQDIVDVDATAEGFIKRMRSYCT
YFPDEEVLPKNSLIVSKYEVYNELNKIRVDDKLLEVDVKNDIYNELFMKNKTVTEKKLKNWLVN
NQCCSKDAEIKGFQKENQFSTSLTPWIDFTNIFGKIDQSNFDLIENIIYDLTVFEDKKIMKRRL
KKKYALPDDKVKQILKLKYKDWSRLSKKLLDGIVADNRFGSSVTVLDVLEMSRLNLMEIINDKD
LGYAQMIEEATSCPEDGKFTYEEVERLAGSPALKRGIWQSLQIVEEITKVMKCRPKYIYIEFER
SEEAKERTESKIKKLENVYKDLDEQTKKEYKSVLEELKGFDNTKKISSDSLFLYFTQLGKCMYS
GKKLDIDSLDKYQIDHIVPQSLVKDDSFDNRVLVVPSENQRKLDDLVVPFDIRDKMYRFWKLLF
DHELISPKKFYSLIKTEYTERDEERFINRQLVETRQITKNVTQIIEDHYSTTKVAAIRANLSHE
FRVKNHIYKNRDINDYHHAHDAYIVALIGGFMRDRYPNMHDSKAVYSEYMKMFRKNKNDQKRWK
DGFVINSMNYPYEVDGKLIWNPDLINEIKKCFYYKDCYCTTKLDQKSGQLFNLTVLSNDAHADK
GVTKAVVPVNKNRSDVHKYGGFSGLQYTIVAIEGQKKKGKKTELVKKISGVPLHLKAASINEKI
NYIEEKEGLSDVRIIKDNIPVNQMIEMDGGEYLLTSPTEYVNARQLVLNEKQCALIADIYNAIY
KQDYDNLDDILMIQLYIELTNKMKVLYPAYRGIAEKFESMNENYVVISKEEKANIIKQMLIVMH
RGPQNGNIVYDDFKISDRIGRLKTKNHNLNNIVFISQSPTGIYTKKYKL
SEQ ID NO: 315
MKSEKKYYIGLDVGTNSVGWAVTDEFYNILRAKGKDLWGVRLFEKADTAANTRIFRSGRRRNDR
KGMRLQILREIFEDEIKKVDKDFYDRLDESKFWAEDKKVSGKYSLFNDKNFSDKQYFEKFPTIF
HLRKYLMEEHGKVDIRYYFLAINQMMKRRGHFLIDGQISHVTDDKPLKEQLILLINDLLKIELE
EELMDSIFEILADVNEKRTDKKNNLKELIKGQDFNKQEGNILNSIFESIVTGKAKIKNIISDED
ILEKIKEDNKEDFVLTGDSYEENLQYFEEVLQENITLFNTLKSTYDFLILQSILKGKSTLSDAQ
VERYDEHKKDLEILKKVIKKYDEDGKLFKQVFKEDNGNGYVSYIGYYLNKNKKITAKKKISNIE
FTKYVKGILEKQCDCEDEDVKYLLGKIEQENFLLKQISSINSVIPHQIHLFELDKILENLAKNY
PSFNNKKEEFTKIEKIRKTFTFRIPYYVGPLNDYHKNNGGNAWIFRNKGEKIRPWNFEKIVDLH
KSEEEFIKRMLNQCTYLPEETVLPKSSILYSEYMVLNELNNLRINGKPLDTDVKLKLIEELFKK
KTKVTLKSIRDYMVRNNFADKEDFDNSEKNLEIASNMKSYIDFNNILEDKFDVEMVEDLIEKIT
IHTGNKKLLKKYIEETYPDLSSSQIQKIINLKYKDWGRLSRKLLDGIKGTKKETEKTDTVINFL
RNSSDNLMQIIGSQNYSFNEYIDKLRKKYIPQEISYEVVENLYVSPSVKKMIWQVIRVTEEITK
VMGYDPDKIFIEMAKSEEEKKTTISRKNKLLDLYKAIKKDERDSQYEKLLTGLNKLDDSDLRSR
KLYLYYTQMGRDMYTGEKIDLDKLFDSTHYDKDHIIPQSMKKDDSIINNLVLVNKNANQTTKGN
IYPVPSSIRNNPKIYNYWKYLMEKEFISKEKYNRLIRNTPLTNEELGGFINRQLVETRQSTKAI
KELFEKFYQKSKIIPVKASLASDLRKDMNTLKSREVNDLHHAHDAFLNIVAGDVWNREFTSNPI
NYVKENREGDKVKYSLSKDFTRPRKSKGKVIWTPEKGRKLIVDTLNKPSVLISNESHVKKGELF
NATIAGKKDYKKGKIYLPLKKDDRLQDVSKYGGYKAINGAFFFLVEHTKSKKRIRSIELFPLHL
LSKFYEDKNTVLDYAINVLQLQDPKIIIDKINYRTEIIIDNFSYLISTKSNDGSITVKPNEQMY
WRVDEISNLKKIENKYKKDAILTEEDRKIMESYIDKIYQQFKAGKYKNRRTTDTIIEKYEIIDL
DTLDNKQLYQLLVAFISLSYKTSNNAVDFTVIGLGTECGKPRITNLPDNTYLVYKSITGIYEKR
IRIK
SEQ ID NO: 316
MKLRGIEDDYSIGLDMGTSSVGWAVTDERGTLAHFKRKPTWGSRLFREAQTAAVARMPRGQRRR
YVRRRWRLDLLQKLFEQQMEQADPDFFIRLRQSRLLRDDRAEEHADYRWPLFNDCKFTERDYYQ
RFPTIYHVRSWLMETDEQADIRLIYLALHNIVKHRGNFLREGQSLSAKSARPDEALNHLRETLR
VWSSERGFECSIADNGSILAMLTHPDLSPSDRRKKIAPLFDVKSDDAAADKKLGIALAGAVIGL
KTEFKNIFGDFPCEDSSIYLSNDEAVDAVRSACPDDCAELFDRLCEVYSAYVLQGLLSYAPGQT
ISANMVEKYRRYGEDLALLKKLVKIYAPDQYRMFFSGATYPGTGIYDAAQARGYTKYNLGPKKS
EYKPSESMQYDDFRKAVEKLFAKTDARADERYRMMMDRFDKQQFLRRLKTSDNGSIYHQLHLEE
LKAIVENQGRFYPFLKRDADKLVSLVSFRIPYYVGPLSTRNARTDQHGENRFAWSERKPGMQDE
PIFPWNWESIIDRSKSAEKFILRMTGMCTYLQQEPVLPKSSLLYEEFCVLNELNGAHWSIDGDD
EHRFDAADREGIIEELFRRKRTVSYGDVAGWMERERNQIGAHVCGGQGEKGFESKLGSYIFFCK
DVFKVERLEQSDYPMIERIILWNTLFEDRKILSQRLKEEYGSRLSAEQIKTICKKRFTGWGRLS
EKFLTGITVQVDEDSVSIMDVLREGCPVSGKRGRAMVMMEILRDEELGFQKKVDDFNRAFFAEN
AQALGVNELPGSPAVRRSLNQSIRIVDEIASIAGKAPANIFIEVTRDEDPKKKGRRTKRRYNDL
KDALEAFKKEDPELWRELCETAPNDMDERLSLYFMQRGKCLYSGRAIDIHQLSNAGIYEVDHII
PRTYVKDDSLENKALVYREENQRKTDMLLIDPEIRRRMSGYWRMLHEAKLIGDKKFRNLLRSRI
DDKALKGFIARQLVETGQMVKLVRSLLEARYPETNIISVKASISHDLRTAAELVKCREANDFHH
AHDAFLACRVGLFIQKRHPCVYENPIGLSQVVRNYVRQQADIFKRCRTIPGSSGFIVNSFMTSG
FDKETGEIFKDDWDAEAEVEGIRRSLNFRQCFISRMPFEDHGVFWDATIYSPRAKKTAALPLKQ
GLNPSRYGSFSREQFAYFFIYKARNPRKEQTLFEFAQVPVRLSAQIRQDENALERYARELAKDQ
GLEFIRIERSKILKNQLIEIDGDRLCITGKEEVRNACELAFAQDEMRVIRMLVSEKPVSRECVI
SLFNRILLHGDQASRRLSKQLKLALLSEAFSEASDNVQRNVVLGLIAIFNGSTNMVNLSDIGGS
KFAGNVRIKYKKELASPKVNVHLIDQSVTGMFERRTKIGL
SEQ ID NO: 317
MENKQYYIGLDVGTNSVGWAVTDTSYNLLRAKGKDMWGARLFEKANTAAERRTKRTSRRRSERE
KARKAMLKELFADEINRVDPSFFIRLEESKFFLDDRSENNRQRYTLFNDATFTDKDYYEKYKTI
FHLRSALINSDEKFDVRLVFLAILNLFSHRGHFLNASLKGDGDIQGMDVFYNDLVESCEYFEIE
LPRITNIDNFEKILSQKGKSRTKILEELSEELSISKKDKSKYNLIKLISGLEASVVELYNIEDI
QDENKKIKIGFRESDYEESSLKVKEIIGDEYFDLVERAKSVHDMGLLSNIIGNSKYLCEARVEA
YENHHKDLLKIKELLKKYDKKAYNDMFRKMTDKNYSAYVGSVNSNIAKERRSVDKRKIEDLYKY
IEDTALKNIPDDNKDKIEILEKIKLGEFLKKQLTASNGVIPNQLQSRELRAILKKAENYLPFLK
EKGEKNLTVSEMIIQLFEFQIPYYVGPLDKNPKKDNKANSWAKIKQGGRILPWNFEDKVDVKGS
RKEFIEKMVRKCTYISDEHTLPKQSLLYEKFMVLNEINNIKIDGEKISVEAKQKIYNDLFVKGK
KVSQKDIKKELISLNIMDKDSVLSGTDTVCNAYLSSIGKFTGVFKEEINKQSIVDMIEDIIFLK
TVYGDEKRFVKEEIVEKYGDEIDKDKIKRILGFKFSNWGNLSKSFLELEGADVGTGEVRSIIQS
LWETNFNLMELLSSRFTYMDELEKRVKKLEKPLSEWTIEDLDDMYLSSPVKRMIWQSMKIVDEI
QTVIGYAPKRIFVEMTRSEGEKVRTKSRKDRLKELYNGIKEDSKQWVKELDSKDESYFRSKKMY
LYYLQKGRCMYSGEVIELDKLMDDNLYDIDHIYPRSFVKDDSLDNLVLVKKEINNRKQNDPITP
QIQASCQGFWKILHDQGFMSNEKYSRLTRKTQEFSDEEKLSFINRQIVETGQATKCMAQILQKS
MGEDVDVVFSKARLVSEFRHKFELFKSRLINDFHHANDAYLNIVVGNSYFVKFTRNPANFIKDA
RKNPDNPVYKYHMDRFFERDVKSKSEVAWIGQSEGNSGTIVIVKKTMAKNSPLITKKVEEGHGS
ITKETIVGVKEIKFGRNKVEKADKTPKKPNLQAYRPIKTSDERLCNILRYGGRTSISISGYCLV
EYVKKRKTIRSLEAIPVYLGRKDSLSEEKLLNYFRYNLNDGGKDSVSDIRLCLPFISTNSLVKI
DGYLYYLGGKNDDRIQLYNAYQLKMKKEEVEYIRKIEKAVSMSKFDEIDREKNPVLTEEKNIEL
YNKIQDKFENTVFSKRMSLVKYNKKDLSFGDFLKNKKSKFEEIDLEKQCKVLYNIIFNLSNLKE
VDLSDIGGSKSTGKCRCKKNITNYKEFKLIQQSITGLYSCEKDLMTI
SEQ ID NO: 318
MKNLKEYYIGLDIGTASVGWAVTDESYNIPKFNGKKMWGVRLFDDAKTAEERRTQRGSRRRLNR
RKERINLLQDLFATEISKVDPNFFLRLDNSDLYREDKDEKLKSKYTLFNDKDFKDRDYHKKYPT
IHHLIMDLIEDEGKKDIRLLYLACHYLLKNRGHFIFEGQKFDTKNSFDKSINDLKIHLRDEYNI
DLEFNNEDLIEIITDTTLNKTNKKKELKNIVGDTKFLKAISAIMIGSSQKLVDLFEDGEFEETT
VKSVDFSTTAFDDKYSEYEEALGDTISLLNILKSIYDSSILENLLKDADKSKDGNKYISKAFVK
KFNKHGKDLKTLKRIIKKYLPSEYANIFRNKSINDNYVAYTKSNITSNKRTKASKFTKQEDFYK
FIKKHLDTIKETKLNSSENEDLKLIDEMLTDIEFKTFIPKLKSSDNGVIPYQLKLMELKKILDN
QSKYYDFLNESDEYGTVKDKVESIMEFRIPYYVGPLNPDSKYAWIKRENTKITPWNFKDIVDLD
SSREEFIDRLIGRCTYLKEEKVLPKASLIYNEFMVLNELNNLKLNEFLITEEMKKAIFEELFKT
KKKVTLKAVSNLLKKEFNLTGDILLSGTDGDFKQGLNSYIDFKNIIGDKVDRDDYRIKIEEIIK
LIVLYEDDKTYLKKKIKSAYKNDFTDDEIKKIAALNYKDWGRLSKRFLTGIEGVDKTTGEKGSI
IYFMREYNLNLMELMSGHYTFTEEVEKLNPVENRELCYEMVDELYLSPSVKRMLWQSLRVVDEI
KRIIGKDPKKIFIEMARAKEAKNSRKESRKNKLLEFYKFGKKAFINEIGEERYNYLLNEINSEE
ESKFRWDNLYLYYTQLGRCMYSLEPIDLADLKSNNIYDQDHIYPKSKIYDDSLENRVLVKKNLN
HEKGNQYPIPEKVLNKNAYGFWKILFDKGLIGQKKYTRLTRRTPFEERELAEFIERQIVETRQA
TKETANLLKNICQDSEIVYSKAENASRFRQEFDIIKCRTVNDLHHMHDAYLNIVVGNVYNTKFT
KNPLNFIKDKDNVRSYNLENMFKYDVVRGSYTAWIADDSEGNVKAATIKKVKRELEGKNYRFTR
MSYIGTGGLYDQNLMRKGKGQIPQKENTNKSNIEKYGGYNKASSAYFALIESDGKAGRERTLET
IPIMVYNQEKYGNTEAVDKYLKDNLELQDPKILKDKIKINSLIKLDGFLYNIKGKTGDSLSIAG
SVQLIVNKEEQKLIKKMDKFLVKKKDNKDIKVTSFDNIKEEELIKLYKTLSDKLNNGIYSNKRN
NQAKNISEALDKFKEISIEEKIDVLNQIILLFQSYNNGCNLKSIGLSAKTGVVFIPKKLNYKEC
KLINQSITGLFENEVDLLNL
SEQ ID NO: 319
MGKMYYLGLDIGTNSVGYAVTDPSYHLLKFKGEPMWGAHVFAAGNQSAERRSFRTSRRRLDRRQ
QRVKLVQEIFAPVISPIDPRFFIRLHESALWRDDVAETDKHIFFNDPTYTDKEYYSDYPTIHHL
IVDLMESSEKHDPRLVYLAVAWLVAHRGHFLNEVDKDNIGDVLSFDAFYPEFLAFLSDNGVSPW
VCESKALQATLLSRNSVNDKYKALKSLIFGSQKPEDNFDANISEDGLIQLLAGKKVKVNKLFPQ
ESNDASFTLNDKEDAIEEILGTLTPDECEWIAHIRRLFDWAIMKHALKDGRTISESKVKLYEQH
HHDLTQLKYFVKTYLAKEYDDIFRNVDSETTKNYVAYSYHVKEVKGTLPKNKATQEEFCKYVLG
KVKNIECSEADKVDFDEMIQRLTDNSFMPKQVSGENRVIPYQLYYYELKTILNKAASYLPFLTQ
CGKDAISNQDKLLSIMTFRIPYFVGPLRKDNSEHAWLERKAGKIYPWNFNDKVDLDKSEEAFIR
RMTNTCTYYPGEDVLPLDSLIYEKFMILNEINNIRIDGYPISVDVKQQVFGLFEKKRRVTVKDI
QNLLLSLGALDKHGKLTGIDTTIHSNYNTYHHFKSLMERGVLTRDDVERIVERMTYSDDTKRVR
LWLNNNYGTLTADDVKHISRLRKHDFGRLSKMFLTGLKGVHKETGERASILDFMWNTNDNLMQL
LSECYTFSDEITKLQEAYYAKAQLSLNDFLDSMYISNAVKRPIYRTLAVVNDIRKACGTAPKRI
FIEMARDGESKKKRSVTRREQIKNLYRSIRKDFQQEVDFLEKILENKSDGQLQSDALYLYFAQL
GRDMYTGDPIKLEHIKDQSFYNIDHIYPQSMVKDDSLDNKVLVQSEINGEKSSRYPLDAAIRNK
MKPLWDAYYNHGLISLKKYQRLTRSTPFTDDEKWDFINRQLVETRQSTKALAILLKRKFPDTEI
VYSKAGLSSDFRHEFGLVKSRNINDLHHAKDAFLAIVTGNVYHERFNRRWFMVNQPYSVKTKTL
FTHSIKNGNFVAWNGEEDLGRIVKMLKQNKNTIHFTRFSFDRKEGLFDIQPLKASTGLVPRKAG
LDVVKYGGYDKSTAAYYLLVRFTLEDKKTQHKLMMIPVEGLYKARIDHDKEFLTDYAQTTISEI
LQKDKQKVINIMFPMGTRHIKLNSMISIDGFYLSIGGKSSKGKSVLCHAMVPLIVPHKIECYIK
AMESFARKFKENNKLRIVEKFDKITVEDNLNLYELFLQKLQHNPYNKFFSTQFDVLTNGRSTFT
KLSPEEQVQTLLNILSIFKTCRSSGCDLKSINGSAQAARIMISADLTGLSKKYSDIRLVEQSAS
GLFVSKSQNLLEYL
SEQ ID NO: 320
MTKKEQPYNIGLDIGTSSVGWAVTNDNYDLLNIKKKNLWGVRLFEEAQTAKETRLNRSTRRRYR
RRKNRINWLNEIFSEELAKTDPSFLIRLQNSWVSKKDPDRKRDKYNLFIDGPYTDKEYYREFPT
IFHLRKELILNKDKADIRLIYLALHNILKYRGNFTYEHQKFNISNLNNNLSKELIELNQQLIKY
DISFPDDCDWNHISDILIGRGNATQKSSNILKDFTLDKETKKLLKEVINLILGNVAHLNTIFKT
SLTKDEEKLNFSGKDIESKLDDLDSILDDDQFTVLDAANRIYSTITLNEILNGESYFSMAKVNQ
YENHAIDLCKLRDMWHTTKNEEAVEQSRQAYDDYINKPKYGTKELYTSLKKFLKVALPTNLAKE
AEEKISKGTYLVKPRNSENGVVPYQLNKIEMEKIIDNQSQYYPFLKENKEKLLSILSFRIPYYV
GPLQSAEKNPFAWMERKSNGHARPWNFDEIVDREKSSNKFIRRMTVTDSYLVGEPVLPKNSLIY
QRYEVLNELNNIRITENLKTNPIGSRLTVETKQRIYNELFKKYKKVTVKKLTKWLIAQGYYKNP
ILIGLSQKDEFNSTLTTYLDMKKIFGSSFMEDNKNYDQIEELIEWLTIFEDKQILNEKLHSSKY
SYTPDQIKKISNMRYKGWGRLSKKILMDITTETNTPQLLQLSNYSILDLMWATNNNFISIMSND
KYDFKNYIENHNLNKNEDQNISDLVNDIHVSPALKRGITQSIKIVQEIVKFMGHAPKHIFIEVT
RETKKSEITTSREKRIKRLQSKLLNKANDFKPQLREYLVPNKKIQEELKKHKNDLSSERIMLYF
LQNGKSLYSEESLNINKLSDYQVDHILPRTYIPDDSLENKALVLAKENQRKADDLLLNSNVIDR
NLERWTYMLNNNMIGLKKFKNLTRRVITDKDKLGFIHRQLVQTSQMVKGVANILDNMYKNQGTT
CIQARANLSTAFRKALSGQDDTYHFKHPELVKNRNVNDFHHAQDAYLASFLGTYRLRRFPTNEM
LLMNGEYNKFYGQVKELYSKKKKLPDSRKNGFIISPLVNGTTQYDRNTGEIIWNVGFRDKILKI
FNYHQCNVTRKTEIKTGQFYDQTIYSPKNPKYKKLIAQKKDMDPNIYGGFSGDNKSSITIVKID
NNKIKPVAIPIRLINDLKDKKTLQNWLEENVKHKKSIQIIKNNVPIGQIIYSKKVGLLSLNSDR
EVANRQQLILPPEHSALLRLLQIPDEDLDQILAFYDKNILVEILQELITKMKKFYPFYKGEREF
LIANIENFNQATTSEKVNSLEELITLLHANSTSAHLIFNNIEKKAFGRKTHGLTLNNTDFIYQS
VTGLYETRIHIE
SEQ ID NO: 321
MTKFNKNYSIGLDIGVSSVGYAVVTEDYRVPAFKFKVLGNTEKEKIKKNLIGSTTFVSAQPAKG
TRVFRVNRRRIDRRNHRITYLRDIFQKEIEKVDKNFYRRLDESFRVLGDKSEDLQIKQPFFGDK
ELETAYHKKYPTIYHLRKHLADADKNSPVADIREVYMAISHILKYRGHFLTLDKINPNNINMQN
SWIDFIESCQEVFDLEISDESKNIADIFKSSENRQEKVKKILPYFQQELLKKDKSIFKQLLQLL
FGLKTKFKDCFELEEEPDLNFSKENYDENLENFLGSLEEDFSDVFAKLKVLRDTILLSGMLTYT
GATHARFSATMVERYEEHRKDLQRFKFFIKQNLSEQDYLDIFGRKTQNGFDVDKETKGYVGYIT
NKMVLTNPQKQKTIQQNFYDYISGKITGIEGAEYFLNKISDGTFLRKLRTSDNGAIPNQIHAYE
LEKIIERQGKDYPFLLENKDKLLSILTFKIPYYVGPLAKGSNSRFAWIKRATSSDILDDNDEDT
RNGKIRPWNYQKLINMDETRDAFITNLIGNDIILLNEKVLPKRSLIYEEVMLQNELTRVKYKDK
YGKAHFFDSELRQNIINGLFKNNSKRVNAKSLIKYLSDNHKDLNAIEIVSGVEKGKSFNSTLKT
YNDLKTIFSEELLDSEIYQKELEEIIKVITVFDDKKSIKNYLTKFFGHLEILDEEKINQLSKLR
YSGWGRYSAKLLLDIRDEDTGFNLLQFLRNDEENRNLTKLISDNTLSFEPKIKDIQSKSTIEDD
IFDEIKKLAGSPAIKRGILNSIKIVDELVQIIGYPPHNIVIEMARENMTTEEGQKKAKTRKTKL
ESALKNIENSLLENGKVPHSDEQLQSEKLYLYYLQNGKDMYTLDKTGSPAPLYLDQLDQYEVDH
IIPYSFLPIDSIDNKVLTHRENNQQKLNNIPDKETVANMKPFWEKLYNAKLISQTKYQRLTTSE
RTPDGVLTESMKAGFIERQLVETRQIIKHVARILDNRFSDTKIITLKSQLITNFRNTFHIAKIR
ELNDYHHAHDAYLAVVVGQTLLKVYPKLAPELIYGHHAHFNRHEENKATLRKHLYSNIMRFFNN
PDSKVSKDIWDCNRDLPIIKDVIYNSQINFVKRTMIKKGAFYNQNPVGKFNKQLAANNRYPLKT
KALCLDTSIYGGYGPMNSALSIIIIAERFNEKKGKIETVKEFHDIFIIDYEKFNNNPFQFLNDT
SENGFLKKNNINRVLGFYRIPKYSLMQKIDGTRMLFESKSNLHKATQFKLTKTQNELFFHMKRL
LTKSNLMDLKSKSAIKESQNFILKHKEEFDNISNQLSAFSQKMLGNTTSLKNLIKGYNERKIKE
IDIRDETIKYFYDNFIKMFSFVKSGAPKDINDFFDNKCTVARMRPKPDKKLLNATLIHQSITGL
YETRIDLSKLGED
SEQ ID NO: 322
MKQEYFLGLDMGTGSLGWAVTDSTYQVMRKHGKALWGTRLFESASTAEERRMFRTARRRLDRRN
WRIQVLQEIFSEEISKVDPGFFLRMKESKYYPEDKRDAEGNCPELPYALFVDDNYTDKNYHKDY
PTIYHLRKMLMETTEIPDIRLVYLVLHHMMKHRGHFLLSGDISQIKEFKSTFEQLIQNIQDEEL
EWHISLDDAAIQFVEHVLKDRNLTRSTKKSRLIKQLNAKSACEKAILNLLSGGTVKLSDIFNNK
ELDESERPKVSFADSGYDDYIGIVEAELAEQYYIIASAKAVYDWSVLVEILGNSVSISEAKIKV
YQKHQADLKTLKKIVRQYMTKEDYKRVFVDTEEKLNNYSAYIGMTKKNGKKVDLKSKQCTQADF
YDFLKKNVIKVIDHKEITQEIESEIEKENFLPKQVTKDNGVIPYQVHDYELKKILDNLGTRMPF
IKENAEKIQQLFEFRIPYYVGPLNRVDDGKDGKFTWSVRKSDARIYPWNFTEVIDVEASAEKFI
RRMTNKCTYLVGEDVLPKDSLVYSKFMVLNELNNLRLNGEKISVELKQRIYEELFCKYRKVTRK
KLERYLVIEGIAKKGVEITGIDGDFKASLTAYHDFKERLTDVQLSQRAKEAIVLNVVLFGDDKK
LLKQRLSKMYPNLTTGQLKGICSLSYQGWGRLSKTFLEEITVPAPGTGEVWNIMTALWQTNDNL
MQLLSRNYGFTNEVEEFNTLKKETDLSYKTVDELYVSPAVKRQIWQTLKVVKEIQKVMGNAPKR
VFVEMAREKQEGKRSDSRKKQLVELYRACKNEERDWITELNAQSDQQLRSDKLFLYYIQKGRCM
YSGETIQLDELWDNTKYDIDHIYPQSKTMDDSLNNRVLVKKNYNAIKSDTYPLSLDIQKKMMSF
WKMLQQQGFITKEKYVRLVRSDELSADELAGFIERQIVETRQSTKAVATILKEALPDTEIVYVK
AGNVSNFRQTYELLKVREMNDLHHAKDAYLNIVVGNAYFVKFTKNAAWFIRNNPGRSYNLKRMF
EFDIERSGEIAWKAGNKGSIVTVKKVMQKNNILVTRKAYEVKGGLFDQQIMKKGKGQVPIKGND
ERLADIEKYGGYNKAAGTYFMLVKSLDKKGKEIRTIEFVPLYLKNQIEINHESAIQYLAQERGL
NSPEILLSKIKIDTLFKVDGFKMWLSGRTGNQLIFKGANQLILSHQEAAILKGVVKYVNRKNEN
KDAKLSERDGMTEEKLLQLYDTFLDKLSNTVYSIRLSAQIKTLTEKRAKFIGLSNEDQCIVLNE
ILHMFQCQSGSANLKLIGGPGSAGILVMNNNITACKQISVINQSPTGIYEKEIDLIKL
SEQ ID NO: 323
MKKPYSIGLDIGTNSVGWAVVTDDYKVPAKKMKVLGNTDKSHIEKNLLGALLFDSGNTAEDRRL
KRTARRRYTRRRNRILYLQEIFSEEMGKVDDSFFHRLEDSFLVTEDKRGERHPIFGNLEEEVKY
HENFPTIYHLRQYLADNPEKVDLRLVYLALAHIIKFRGHFLIEGKFDTRNNDVQRLFQEFLAVY
DNTFENSSLQEQNVQVEEILTDKISKSAKKDRVLKLFPNEKSNGRFAEFLKLIVGNQADFKKHF
ELEEKAPLQFSKDTYEEELEVLLAQIGDNYAELFLSAKKLYDSILLSGILTVTDVGTKAPLSAS
MIQRYNEHQMDLAQLKQFIRQKLSDKYNEVFSDVSKDGYAGYIDGKTNQEAFYKYLKGLLNKIE
GSGYFLDKIEREDFLRKQRTFDNGSIPHQIHLQEMRAIIRRQAEFYPFLADNQDRIEKLLTFRI
PYYVGPLARGKSDFAWLSRKSADKITPWNFDEIVDKESSAEAFINRMTNYDLYLPNQKVLPKHS
LLYEKFTVYNELTKVKYKTEQGKTAFFDANMKQEIFDGVFKVYRKVTKDKLMDFLEKEFDEFRI
VDLTGLDKENKVFNASYGTYHDLCKILDKDFLDNSKNEKILEDIVLTLTLFEDREMIRKRLENY
SDLLTKEQVKKLERRHYTGWGRLSAELIHGIRNKESRKTILDYLIDDGNSNRNFMQLINDDALS
FKEEIAKAQVIGETDNLNQVVSDIAGSPAIKKGILQSLKIVDELVKIMGHQPENIVVEMARENQ
FTNQGRRNSQQRLKGLTDSIKEFGSQILKEHPVENSQLQNDRLFLYYLQNGRDMYTGEELDIDY
LSQYDIDHIIPQAFIKDNSIDNRVLTSSKENRGKSDDVPSKDVVRKMKSYWSKLLSAKLITQRK
FDNLTKAERGGLTDDDKAGFIKRQLVETRQITKHVARILDERFNTETDENNKKIRQVKIVTLKS
NLVSNFRKEFELYKVREINDYHHAHDAYLNAVIGKALLGVYPQLEPEFVYGDYPHFHGHKENKA
TAKKFFYSNIMNFFKKDDVRTDKNGEIIWKKDEHISNIKKVLSYPQVNIVKKVEEQTGGFSKES
ILPKGNSDKLIPRKTKKFYWDTKKYGGFDSPIVAYSILVIADIEKGKSKKLKTVKALVGVTIME
KMTFERDPVAFLERKGYRNVQEENIIKLPKYSLFKLENGRKRLLASARELQKGNEIVLPNHLGT
LLYHAKNIHKVDEPKHLDYVDKHKDEFKELLDVVSNFSKKYTLAEGNLEKIKELYAQNNGEDLK
ELASSFINLLTFTAIGAPATFKFFDKNIDRKRYTSTTEILNATLIHQSITGLYETRIDLNKLGG
D
SEQ ID NO: 324
[sequence omitted]
SEQ ID NO: 325
MTKPYSIGLDIGTNSVGWAVTTDNYKVPSKKMKVLGNTSKKYIKKNLLGVLLFDSGITAEGRRL
KRTARRRYTRRRNRILYLQEIFSTEMATLDDAFFQRLDDSFLVPDDKRDSKYPIFGNLVEEKAY
HDEFPTIYHLRKYLADSTKKADLRLVYLALAHMIKYRGHFLIEGEFNSKNNDIQKNFQDFLDTY
NAIFESDLSLENSKQLEEIVKDKISKLEKKDRILKLFPGEKNSGIFSEFLKLIVGNQADFRKCF
NLDEKASLHFSKESYDEDLETLLGYIGDDYSDVFLKAKKLYDAILLSGFLTVTDNETEAPLSSA
MIKRYNEHKEDLALLKEYIRNISLKTYNEVFKDDTKNGYAGYIDGKTNQEDFYVYLKKLLAEFE
GADYFLEKIDREDFLRKQRTFDNGSIPYQIHLQEMRAILDKQAKFYPFLAKNKERIEKILTFRI
PYYVGPLARGNSDFAWSIRKRNEKITPWNFEDVIDKESSAEAFINRMTSFDLYLPEEKVLPKHS
LLYETFNVYNELTKVRFIAESMRDYQFLDSKQKKDIVRLYFKDKRKVTDKDIIEYLHAIYGYDG
IELKGIEKQFNSSLSTYHDLLNIINDKEFLDDSSNEAIIEEIIHTLTIFEDREMIKQRLSKFEN
IFDKSVLKKLSRRHYTGWGKLSAKLINGIRDEKSGNTILDYLIDDGISNRNFMQLIHDDALSFK
KKIQKAQIIGDEDKGNIKEVVKSLPGSPAIKKGILQSIKIVDELVKVMGGRKPESIVVEMAREN
QYTNQGKSNSQQRLKRLEKSLKELGSKILKENIPAKLSKIDNNALQNDRLYLYYLQNGKDMYTG
DDLDIDRLSNYDIDHIIPQAFLKDNSIDNKVLVSSASNRGKSDDVPSLEVVKKRKTFWYQLLKS
KLISQRKFDNLTKAERGGLSPEDKAGFIQRQLVETRQITKHVARLLDEKFNNKKDENNRAVRTV
KIITLKSTLVSQFRKDFELYKVREINDFHHAHDAYLNAVVASALLKKYPKLEPEFVYGDYPKYN
SFRERKSATEKVYFYSNIMNIFKKSISLADGRVIERPLIEVNEETGESVWNKESDLATVRRVLS
YPQVNVVKKVEEQNHGLDRGKPKGLFNANLSSKPKPNSNENLVGAKEYLDPKKYGGYAGISNSF
TVLVKGTIEKGAKKKITNVLEFQGISILDRINYRKDKLNFLLEKGYKDIELIIELPKYSLFELS
DGSRRMLASILSTNNKRGEIHKGNQIFLSQKFVKLLYHAKRISNTINENHRKYVENHKKEFEEL
FYYILEFNENYVGAKKNGKLLNSAFQSWQNHSIDELCSSFIGPTGSERKGLFELTSRGSAADFE
FLGVKIPRYRDYTPSSLLKDATLIHQSVTGLYETRIDLAKLGEG
SEQ ID NO: 326
MKKQKFSDYYLGFDIGTNSVGWCVTDLDYNVLRFNKKDMWGSRLFDEAKTAAERRVQRNSRRRL
KRRKWRLNLLEEIFSDEIMKIDSNFFRRLKESSLWLEDKNSKEKFTLFNDDNYKDYDFYKQYPT
IFHLRDELIKNPEKKDIRLIYLALHSIFKSRGHFLFEGQNLKEIKNFETLYNNLISFLEDNGIN
KSIDKDNIEKLEKIICDSGKGLKDKEKEFKGIFNSDKQLVAIFKLSVGSSVSLNDLFDTDEYKK
EEVEKEKISFREQIYEDDKPIYYSILGEKIELLDIAKSFYDFMVLNNILSDSNYISEAKVKLYE
EHKKDLKNLKYIIRKYNKENYDKLFKDKNENNYPAYIGLNKEKDKKEVVEKSRLKIDDLIKVTK
GYLPKPERIEEKDKTIFNEILNKIELKTILPKQRISDNGTLPYQIHEVELEKILENQSKYYDFL
NYEENGVSTKDKLLKTFKFRIPYYVGPLNSYHKDKGGNSWIVRKEEGKILPWNFEQKVDIEKSA
EEFIKRMTNKCTYLNGEDVIPKDSFLYSEYIILNELNKVQVNDEFLNEENKRKIIDELFKENKK
VSEKKFKEYLLVNQIANRTVELKGIKDSFNSNYVSYIKFKDIFGEKLNLDIYKEISEKSILWKC
LYGDDKKIFEKKIKNEYGDILNKDEIKKINSFKFNTWGRLSEKLLTGIEFINLETGECYSSVME
ALRRTNYNLMELLSSKFTLQESIDNENKEMNEVSYRDLIEESYVSPSLKRAILQTLKIYEEIKK
ITGRVPKKVFIEMARGGDESMKNKKIPARQEQLKKLYDSCGNDIANFSIDIKEMKNSLSSYDNN
SLRQKKLYLYYLQFGKCMYTGREIDLDRLLQNNDTYDIDHIYPRSKVIKDDSFDNLVLVLKNEN
AEKSNEYPVKKEIQEKMKSFWRFLKEKNFISDEKYKRLTGKDDFELRGFMARQLVNVRQTTKEV
GKILQQIEPEIKIVYSKAEIASSFREMFDFIKVRELNDTHHAKDAYLNIVAGNVYNTKFTEKPY
RYLQEIKENYDVKKIYNYDIKNAWDKENSLEIVKKNMEKNTVNITRFIKEEKGELFNLNPIKKG
ETSNEIISIKPKLYDGKDNKLNEKYGYYTSLKAAYFIYVEHEKKNKKVKTFERITRIDSTLIKN
EKNLIKYLVSQKKLLNPKIIKKIYKEQTLIIDSYPYTFTGVDSNKKVELKNKKQLYLEKKYEQI
LKNALKFVEDNQGETEENYKFIYLKKRNNNEKNETIDAVKERYNIEFNEMYDKFLEKLSSKDYK
NYINNKLYTNFLNSKEKFKKLKLWEKSLILREFLKIFNKNTYGKYEIKDSQTKEKLFSFPEDTG
RIRLGQSSLGNNKELLEESVTGLFVKKIKL
SEQ ID NO: 327
MKNYTIGLDIGVASVGWVCIDENYKILNYNNRHAFGVHEFESAESAAGRRLKRGMRRRYNRRKK
RLQLLQSLFDSYITDSGFFSKTDSQHFWKNNNEFENRSLTEVLSSLRISSRKYPTIYHLRSDLI
ESNKKMDLRLVYLALHNLVKYRGHFLQEGNWSEAASAEGMDDQLLELVTRYAELENLSPLDLSE
SQWKAAETLLLNRNLTKTDQSKELTAMFGKEYEPFCKLVAGLGVSLHQLFPSSEQALAYKETKT
KVQLSNENVEEVMELLLEEESALLEAVQPFYQQVVLYELLKGETYVAKAKVSAFKQYQKDMASL
KNLLDKTFGEKVYRSYFISDKNSQREYQKSHKVEVLCKLDQFNKEAKFAETFYKDLKKLLEDKS
KTSIGTTEKDEMLRIIKAIDSNQFLQKQKGIQNAAIPHQNSLYEAEKILRNQQAHYPFITTEWI
EKVKQILAFRIPYYIGPLVKDTTQSPFSWVERKGDAPITPWNFDEQIDKAASAEAFISRMRKTC
TYLKGQEVLPKSSLTYERFEVLNELNGIQLRTTGAESDFRHRLSYEMKCWIIDNVFKQYKTVST
KRLLQELKKSPYADELYDEHTGEIKEVFGTQKENAFATSLSGYISMKSILGAVVDDNPAMTEEL
IYWIAVFEDREILHLKIQEKYPSITDVQRQKLALVKLPGWGRFSRLLIDGLPLDEQGQSVLDHM
EQYSSVFMEVLKNKGFGLEKKIQKMNQHQVDGTKKIRYEDIEELAGSPALKRGIWRSVKIVEEL
VSIFGEPANIVLEVAREDGEKKRTKSRKDQWEELTKTTLKNDPDLKSFIGEIKSQGDQRFNEQR
FWLYVTQQGKCLYTGKALDIQNLSMYEVDHILPQNFVKDDSLDNLALVMPEANQRKNQVGQNKM
PLEIIEANQQYAMRTLWERLHELKLISSGKLGRLKKPSFDEVDKDKFIARQLVETRQIIKHVRD
LLDERFSKSDIHLVKAGIVSKFRRFSEIPKIRDYNNKHHAMDALFAAALIQSILGKYGKNFLAF
DLSKKDRQKQWRSVKGSNKEFFLFKNFGNLRLQSPVTGEEVSGVEYMKHVYFELPWQTTKMTQT
GDGMFYKESIFSPKVKQAKYVSPKTEKFVHDEVKNHSICLVEFTFMKKEKEVQETKFIDLKVIE
HHQFLKEPESQLAKFLAEKETNSPIIHARIIRTIPKYQKIWIEHFPYYFISTRELHNARQFEIS
YELMEKVKQLSERSSVEELKIVFGLLIDQMNDNYPIYTKSSIQDRVQKFVDTQLYDFKSFEIGF
EELKKAVAANAQRSDTFGSRISKKPKPEEVAIGYESITGLKYRKPRSVVGTKR
SEQ ID NO: 328
MKKEIKDYFLGLDVGTGSVGWAVTDTDYKLLKANRKDLWGMRCFETAETAEVRRLHRGARRRIE
RRKKRIKLLQELFSQEIAKTDEGFFQRMKESPFYAEDKTILQENTLFNDKDFADKTYHKAYPTI
NHLIKAWIENKVKPDPRLLYLACHNIIKKRGHFLFEGDFDSENQFDTSIQALFEYLREDMEVDI
DADSQKVKEILKDSSLKNSEKQSRLNKILGLKPSDKQKKAITNLISGNKINFADLYDNPDLKDA
EKNSISFSKDDFDALSDDLASILGDSFELLLKAKAVYNCSVLSKVIGDEQYLSFAKVKIYEKHK
TDLTKLKNVIKKHFPKDYKKVFGYNKNEKNNNNYSGYVGVCKTKSKKLIINNSVNQEDFYKFLK
TILSAKSEIKEVNDILTEIETGTFLPKQISKSNAEIPYQLRKMELEKILSNAEKHFSFLKQKDE
KGLSHSEKIIMLLTFKIPYYIGPINDNHKKFFPDRCWVVKKEKSPSGKTTPWNFFDHIDKEKTA
EAFITSRTNFCTYLVGESVLPKSSLLYSEYTVLNEINNLQIIIDGKNICDIKLKQKIYEDLFKK
YKKITQKQISTFIKHEGICNKTDEVIILGIDKECTSSLKSYIELKNIFGKQVDEISTKNMLEEI
IRWATIYDEGEGKTILKTKIKAEYGKYCSDEQIKKILNLKFSGWGRLSRKFLETVTSEMPGFSE
PVNIITAMRETQNNLMELLSSEFTFTENIKKINSGFEDAEKQFSYDGLVKPLFLSPSVKKMLWQ
TLKLVKEISHITQAPPKKIFIEMAKGAELEPARTKTRLKILQDLYNNCKNDADAFSSEIKDLSG
KIENEDNLRLRSDKLYLYYTQLGKCMYCGKPIEIGHVFDTSNYDIDHIYPQSKIKDDSISNRVL
VCSSCNKNKEDKYPLKSEIQSKQRGFWNFLQRNNFISLEKLNRLTRATPISDDETAKFIARQLV
ETRQATKVAAKVLEKMFPETKIVYSKAETVSMFRNKFDIVKCREINDFHHAHDAYLNIVVGNVY
NTKFTNNPWNFIKEKRDNPKIADTYNYYKVFDYDVKRNNITAWEKGKTIITVKDMLKRNTPIYT
RQAACKKGELFNQTIMKKGLGQHPLKKEGPFSNISKYGGYNKVSAAYYTLIEYEEKGNKIRSLE
TIPLYLVKDIQKDQDVLKSYLTDLLGKKEFKILVPKIKINSLLKINGFPCHITGKTNDSFLLRP
AVQFCCSNNEVLYFKKIIRFSEIRSQREKIGKTISPYEDLSFRSYIKENLWKKTKNDEIGEKEF
YDLLQKKNLEIYDMLLTKHKDTIYKKRPNSATIDILVKGKEKFKSLIIENQFEVILEILKLFSA
TRNVSDLQHIGGSKYSGVAKIGNKISSLDNCILIYQSITGIFEKRIDLLKV
SEQ ID NO: 329
MEGQMKNNGNNLQQGNYYLGLDVGTSSVGWAVTDTDYNVLKFRGKSMWGARLFDEASTAEERRT
HRGNRRRLARRKYRLLLLEQLFEKEIRKIDDNFFVRLHESNLWADDKSKPSKFLLFNDTNFTDK
DYLKKYPTIYHLRSDLIHNSTEHDIRLVFLALHHLIKYRGHFIYDNSANGDVKTLDEAVSDFEE
YLNENDIEFNIENKKEFINVLSDKHLTKKEKKISLKKLYGDITDSENINISVLIEMLSGSSISL
SNLFKDIEFDGKQNLSLDSDIEETLNDVVDILGDNIDLLIHAKEVYDIAVLTSSLGKHKYLCDA
KVELFEKNKKDLMILKKYIKKNHPEDYKKIFSSPTEKKNYAAYSQTNSKNVCSQEEFCLFIKPY
IRDMVKSENEDEVRIAKEVEDKSFLTKLKGTNNSVVPYQIHERELNQILKNIVAYLPFMNDEQE
DISVVDKIKLIFKFKIPYYVGPLNTKSTRSWVYRSDEKIYPWNFSNVIDLDKTAHEFMNRLIGR
CTYTNDPVLPMDSLLYSKYNVLNEINPIKVNGKAIPVEVKQAIYTDLFENSKKKVTRKSIYIYL
LKNGYIEKEDIVSGIDIEIKSKLKSHHDFTQIVQENKCTPEEIERIIKGILVYSDDKSMLRRWL
KNNIKGLSENDVKYLAKLNYKEWGRLSKTLLTDIYTINPEDGEACSILDIMWNTNATLMEILSN
EKYQFKQNIENYKAENYDEKQNLHEELDDMYISPAARRSIWQALRIVDEIVDIKKSAPKKIFIE
MAREKKSAMKKKRTESRKDTLLELYKSCKSQADGFYDEELFEKLSNESNSRLRRDQLYLYYTQM
GRSMYTGKRIDFDKLINDKNTYDIDHIYPRSKIKDDSITNRVLVEKDINGEKTDIYPISEDIRQ
KMQPFWKILKEKGLINEEKYKRLTRNYELTDEELSSFVARQLVETQQSTKALATLLKKEYPSAK
IVYSKAGNVSEFRNRKDKELPKFREINDLHHAKDAYLNIVVGNVYDTKFTEKFFNNIRNENYSL
KRVFDFSVPGAWDAKGSTFNTIKKYMAKNNPIIAFAPYEVKGELFDQQIVPKGKGQFPIKQGKD
IEKYGGYNKLSSAFLFAVEYKGKKARERSLETVYIKDVELYLQDPIKYCESVLGLKEPQIIKPK
ILMGSLFSINNKKLVVTGRSGKQYVCHHIYQLSINDEDSQYLKNIAKYLQEEPDGNIERQNILN
ITSVNNIKLFDVLCTKFNSNTYEIILNSLKNDVNEGREKFSELDILEQCNILLQLLKAFKCNRE
SSNLEKLNNKKQAGVIVIPHLFTKCSVFKVIHQSITGLFEKEMDLLK
SEQ ID NO: 330
MGRKPYILSLDIGTGSVGYACMDKGFNVLKYHDKDALGVYLFDGALTAQERRQFRTSRRRKNRR
IKRLGLLQELLAPLVQNPNFYQFQRQFAWKNDNMDFKNKSLSEVLSFLGYESKKYPTIYHLQEA
LLLKDEKFDPELIYMALYHLVKYRGHFLFDHLKIENLTNNDNMHDFVELIETYENLNNIKLNLD
YEKTKVIYEILKDNEMTKNDRAKRVKNMEKKLEQFSIMLLGLKFNEGKLFNHADNAEELKGANQ
SHTFADNYEENLTPFLTVEQSEFIERANKIYLSLTLQDILKGKKSMAMSKVAAYDKFRNELKQV
KDIVYKADSTRTQFKKIFVSSKKSLKQYDATPNDQTFSSLCLFDQYLIRPKKQYSLLIKELKKI
IPQDSELYFEAENDTLLKVLNTTDNASIPMQINLYEAETILRNQQKYHAEITDEMIEKVLSLIQ
FRIPYYVGPLVNDHTASKFGWMERKSNESIKPWNFDEVVDRSKSATQFIRRMTNKCSYLINEDV
LPKNSLLYQEMEVLNELNATQIRLQTDPKNRKYRMMPQIKLFAVEHIFKKYKTVSHSKFLEIML
NSNHRENFMNHGEKLSIFGTQDDKKFASKLSSYQDMTKIFGDIEGKRAQIEEIIQWITIFEDKK
ILVQKLKECYPELTSKQINQLKKLNYSGWGRLSEKLLTHAYQGHSIIELLRHSDENFMEILTND
VYGFQNFIKEENQVQSNKIQHQDIANLTTSPALKKGIWSTIKLVRELTSIFGEPEKIIMEFATE
DQQKGKKQKSRKQLWDDNIKKNKLKSVDEYKYIIDVANKLNNEQLQQEKLWLYLSQNGKCMYSG
QSIDLDALLSPNATKHYEVDHIFPRSFIKDDSIDNKVLVIKKMNQTKGDQVPLQFIQQPYERIA
YWKSLNKAGLISDSKLHKLMKPEFTAMDKEGFIQRQLVETRQISVHVRDFLKEEYPNTKVIPMK
AKMVSEFRKKFDIPKIRQMNDAHHAIDAYLNGVVYHGAQLAYPNVDLFDFNFKWEKVREKWKAL
GEFNTKQKSRELFFFKKLEKMEVSQGERLISKIKLDMNHFKINYSRKLANIPQQFYNQTAVSPK
TAELKYESNKSNEVVYKGLTPYQTYVVAIKSVNKKGKEKMEYQMIDHYVFDFYKFQNGNEKELA
LYLAQRENKDEVLDAQIVYSLNKGDLLYINNHPCYFVSRKEVINAKQFELTVEQQLSLYNVMNN
KETNVEKLLIEYDFIAEKVINEYHHYLNSKLKEKRVRTFFSESNQTHEDFIKALDELFKVVTAS
ATRSDKIGSRKNSMTHRAFLGKGKDVKIAYTSISGLKTTKPKSLFKLAESRNEL
SEQ ID NO: 331
MAKILGLDLGTNSIGWAVVERENIDFSLIDKGVRIFSEGVKSEKGIESSRAAERTGYRSARKIK
YRRKLRKYETLKVLSLNRMCPLSIEEVEEWKKSGFKDYPLNPEFLKWLSTDEESNVNPYFFRDR
ASKHKVSLFELGRAFYHIAQRRGFLSNRLDQSAEGILEEHCPKIEAIVEDLISIDEISTNITDY
FFETGILDSNEKNGYAKDLDEGDKKLVSLYKSLLAILKKNESDFENCKSEIIERLNKKDVLGKV
KGKIKDISQAMLDGNYKTLGQYFYSLYSKEKIRNQYTSREEHYLSEFITICKVQGIDQINEEEK
INEKKFDGLAKDLYKAIFFQRPLKSQKGLIGKCSFEKSKSRCAISHPDFEEYRMWTYLNTIKIG
TQSDKKLRFLTQDEKLKLVPKFYRKNDFNFDVLAKELIEKGSSFGFYKSSKKNDFFYWFNYKPT
DTVAACQVAASLKNAIGEDWKTKSFKYQTINSNKEQVSRTVDYKDLWHLLTVATSDVYLYEFAI
DKLGLDEKNAKAFSKTKLKKDFASLSLSAINKILPYLKEGLLYSHAVFVANIENIVDENIWKDE
KQRDYIKTQISEIIENYTLEKSRFEIINGLLKEYKSENEDGKRVYYSKEAEQSFENDLKKKLVL
FYKSNEIENKEQQETIFNELLPIFIQQLKDYEFIKIQRLDQKVLIFLKGKNETGQIFCTEEKGT
AEEKEKKIKNRLKKLYHPSDIEKFKKKIIKDEFGNEKIVLGSPLTPSIKNPMAMRALHQLRKVL
NALILEGQIDEKTIIHIEMARELNDANKRKGIQDYQNDNKKFREDAIKEIKKLYFEDCKKEVEP
TEDDILRYQLWMEQNRSEIYEEGKNISICDIIGSNPAYDIEHTIPRSRSQDNSQMNKTLCSQRF
NREVKKQSMPIELNNHLEILPRIAHWKEEADNLTREIEIISRSIKAAATKEIKDKKIRRRHYLT
LKRDYLQGKYDRFIWEEPKVGFKNSQIPDTGIITKYAQAYLKSYFKKVESVKGGMVAEFRKIWG
IQESFIDENGMKHYKVKDRSKHTHHTIDAITIACMTKEKYDVLAHAWTLEDQQNKKEARSIIEA
SKPWKTFKEDLLKIEEEILVSHYTPDNVKKQAKKIVRVRGKKQFVAEVERDVNGKAVPKKAASG
KTIYKLDGEGKKLPRLQQGDTIRGSLHQDSIYGAIKNPLNTDEIKYVIRKDLESIKGSDVESIV
DEVVKEKIKEAIANKVLLLSSNAQQKNKLVGTVWMNEEKRIAINKVRIYANSVKNPLHIKEHSL
LSKSKHVHKQKVYGQNDENYAMAIYELDGKRDFELINIFNLAKLIKQGQGFYPLHKKKEIKGKI
VFVPIEKRNKRDVVLKRGQQVVFYDKEVENPKDISEIVDFKGRIYIIEGLSIQRIVRPSGKVDE
YGVIMLRYFKEARKADDIKQDNFKPDGVFKLGENKPTRKMNHQFTAFVEGIDFKVLPSGKFEKI
SEQ ID NO: 332
MEFKKVLGLDIGTNSIGCALLSLPKSIQDYGKGGRLEWLTSRVIPLDADYMKAFIDGKNGLPQV
ITPAGKRRQKRGSRRLKHRYKLRRSRLIRVFKTLNWLPEDFPLDNPKRIKETISTEGKFSFRIS
DYVPISDESYREFYREFGYPENEIEQVIEEINFRRKTKGKNKNPMIKLLPEDWVVYYLRKKALI
KPTTKEELIRIIYLFNQRRGFKSSRKDLTETAILDYDEFAKRLAEKEKYSAENYETKFVSITKV
KEVVELKTDGRKGKKRFKVILEDSRIEPYEIERKEKPDWEGKEYTFLVTQKLEKGKFKQNKPDL
PKEEDWALCTTALDNRMGSKHPGEFFFDELLKAFKEKRGYKIRQYPVNRWRYKKELEFIWTKQC
QLNPELNNLNINKEILRKLATVLYPSQSKFFGPKIKEFENSDVLHIISEDIIYYQRDLKSQKSL
ISECRYEKRKGIDGEIYGLKCIPKSSPLYQEFRIWQDIHNIKVIRKESEVNGKKKINIDETQLY
INENIKEKLFELFNSKDSLSEKDILELISLNIINSGIKISKKEEETTHRINLFANRKELKGNET
KSRYRKVFKKLGFDGEYILNHPSKLNRLWHSDYSNDYADKEKTEKSILSSLGWKNRNGKWEKSK
NYDVFNLPLEVAKAIANLPPLKKEYGSYSALAIRKMLVVMRDGKYWQHPDQIAKDQENTSLMLF
DKNLIQLTNNQRKVLNKYLLTLAEVQKRSTLIKQKLNEIEHNPYKLELVSDQDLEKQVLKSFLE
KKNESDYLKGLKTYQAGYLIYGKHSEKDVPIVNSPDELGEYIRKKLPNNSLRNPIVEQVIRETI
FIVRDVWKSFGIIDEIHIELGRELKNNSEERKKTSESQEKNFQEKERARKLLKELLNSSNFEHY
DENGNKIFSSFTVNPNPDSPLDIEKFRIWKNQSGLTDEELNKKLKDEKIPTEIEVKKYILWLTQ
KCRSPYTGKIIPLSKLFDSNVYEIEHIIPRSKMKNDSTNNLVICELGVNKAKGDRLAANFISES
NGKCKFGEVEYTLLKYGDYLQYCKDTFKYQKAKYKNLLATEPPEDFIERQINDTRYIGRKLAEL
LTPVVKDSKNIIFTIGSITSELKITWGLNGVWKDILRPRFKRLESIINKKLIFQDEDDPNKYHF
DLSINPQLDKEGLKRLDHRHHALDATIIAATTREHVRYLNSLNAADNDEEKREYFLSLCNHKIR
DFKLPWENFTSEVKSKLLSCVVSYKESKPILSDPFNKYLKWEYKNGKWQKVFAIQIKNDRWKAV
RRSMFKEPIGTVWIKKIKEVSLKEAIKIQAIWEEVKNDPVRKKKEKYIYDDYAQKVIAKIVQEL
GLSSSMRKQDDEKLNKFINEAKVSAGVNKNLNTTNKTIYNLEGRFYEKIKVAEYVLYKAKRMPL
NKKEYIEKLSLQKMFNDLPNFILEKSILDNYPEILKELESDNKYIIEPHKKNNPVNRLLLEHIL
EYHNNPKEAFSTEGLEKLNKKAINKIGKPIKYITRLDGDINEEEIFRGAVFETDKGSNVYFVMY
ENNQTKDREFLKPNPSISVLKAIEHKNKIDFFAPNRLGFSRIILSPGDLVYVPTNDQYVLIKDN
SSNETIINWDDNEFISNRIYQVKKFTGNSCYFLKNDIASLILSYSASNGVGEFGSQNISEYSVD
DPPIRIKDVCIKIRVDRLGNVRPL
SEQ ID NO: 333
MKHILGLDLGTNSIGWALIERNIEEKYGKIIGMGSRIVPMGAELSKFEQGQAQTKNADRRTNRG
ARRLNKRYKQRRNKLIYILQKLDMLPSQIKLKEDFSDPNKIDKITILPISKKQEQLTAFDLVSL
RVKALTEKVGLEDLGKIIYKYNQLRGYAGGSLEPEKEDIFDEEQSKDKKNKSFIAFSKIVFLGE
PQEEIFKNKKLNRRAIIVETEEGNFEGSTFLENIKVGDSLELLINISASKSGDTITIKLPNKTN
WRKKMENIENQLKEKSKEMGREFYISEFLLELLKENRWAKIRNNTILRARYESEFEAIWNEQVK
HYPFLENLDKKTLIEIVSFIFPGEKESQKKYRELGLEKGLKYIIKNQVVFYQRELKDQSHLISD
CRYEPNEKAIAKSHPVFQEYKVWEQINKLIVNTKIEAGTNRKGEKKYKYIDRPIPTALKEWIFE
ELQNKKEITFSAIFKKLKAEFDLREGIDFLNGMSPKDKLKGNETKLQLQKSLGELWDVLGLDSI
NRQIELWNILYNEKGNEYDLTSDRTSKVLEFINKYGNNIVDDNAEETAIRISKIKFARAYSSLS
LKAVERILPLVRAGKYFNNDFSQQLQSKILKLLNENVEDPFAKAAQTYLDNNQSVLSEGGVGNS
IATILVYDKHTAKEYSHDELYKSYKEINLLKQGDLRNPLVEQIINEALVLIRDIWKNYGIKPNE
IRVELARDLKNSAKERATIHKRNKDNQTINNKIKETLVKNKKELSLANIEKVKLWEAQRHLSPY
TGQPIPLSDLFDKEKYDVDHIIPISRYFDDSFTNKVISEKSVNQEKANRTAMEYFEVGSLKYSI
FTKEQFIAHVNEYFSGVKRKNLLATSIPEDPVQRQIKDTQYIAIRVKEELNKIVGNENVKTTTG
SITDYLRNHWGLTDKFKLLLKERYEALLESEKFLEAEYDNYKKDFDSRKKEYEEKEVLFEEQEL
TREEFIKEYKENYIRYKKNKLIIKGWSKRIDHRHHAIDALIVACTEPAHIKRLNDLNKVLQDWL
VEHKSEFMPNFEGSNSELLEEILSLPENERTEIFTQIEKFRAIEMPWKGFPEQVEQKLKEIIIS
HKPKDKLLLQYNKAGDRQIKLRGQLHEGTLYGISQGKEAYRIPLTKFGGSKFATEKNIQKIVSP
FLSGFIANHLKEYNNKKEEAFSAEGIMDLNNKLAQYRNEKGELKPHTPISTVKIYYKDPSKNKK
KKDEEDLSLQKLDREKAFNEKLYVKTGDNYLFAVLEGEIKTKKTSQIKRLYDIISFFDATNFLK
EEFRNAPDKKTFDKDLLFRQYFEERNKAKLLFTLKQGDFVYLPNENEEVILDKESPLYNQYWGD
LKERGKNIYVVQKFSKKQIYFIKHTIADIIKKDVEFGSQNCYETVEGRSIKENCFKLEIDRLGN
IVKVIKR
SEQ ID NO: 334
MHVEIDFPHFSRGDSHLAMNKNEILRGSSVLYRLGLDLGSNSLGWFVTHLEKRGDRHEPVALGP
GGVRIFPDGRDPQSGTSNAVDRRMARGARKRRDRFVERRKELIAALIKYNLLPDDARERRALEV
LDPYALRKTALTDTLPAHHVGRALFHLNQRRGFQSNRKTDSKQSEDGAIKQAASRLATDKGNET
LGVFFADMHLRKSYEDRQTAIRAELVRLGKDHLTGNARKKIWAKVRKRLFGDEVLPRADAPHGV
RARATITGTKASYDYYPTRDMLRDEFNAIWAGQSAHHATITDEARTEIEHIIFYQRPLKPAIVG
KCTLDPATRPFKEDPEGYRAPWSHPLAQRFRILSEARNLEIRDTGKGSRRLTKEQSDLVVAALL
ANREVKFDKLRTLLKLPAEARFNLESDRRAALDGDQTAARLSDKKGFNKAWRGFPPERQIAIVA
RLEETEDENELIAWLEKECALDGAAAARVANTTLPDGHCRLGLRAIKKIVPIMQDGLDEDGVAG
AGYHIAAKRAGYDHAKLPTGEQLGRLPYYGQWLQDAVVGSGDARDQKEKQYGQFPNPTVHIGLG
QLRRVVNDLIDKYGPPTEISIEFTRALKLSEQQKAERQREQRRNQDKNKARAEELAKFGRPANP
RNLLKMRLWEELAHDPLDRKCVYTGEQISIERLLSDEVDIDHILPVAMTLDDSPANKIICMRYA
NRHKRKQTPSEAFGSSPTLQGHRYNWDDIAARATGLPRNKRWRFDANAREEFDKRGGFLARQLN
ETGWLARLAKQYLGAVTDPNQIWVVPGRLTSMLRGKWGLNGLLPSDNYAGVQDKAEEFLASTDD
MEFSGVKNRADHRHHAIDGLVTALTDRSLLWKMANAYDEEHEKFVIEPPWPTMRDDLKAALEKM
VVSHKPDHGIEGKLHEDSAYGFVKPLDATGLKEEEAGNLVYRKAIESLNENEVDRIRDIQLRTI
VRDHVNVEKTKGVALADALRQLQAPSDDYPQFKHGLRHVRILKKEKGDYLVPIANRASGVAYKA
YSAGENFCVEVFETAGGKWDGEAVRRFDANKKNAGPKIAHAPQWRDANEGAKLVMRIHKGDLIR
LDHEGRARIMVVHRLDAAAGRFKLADHNETGNLDKRHATNNDIDPFRWLMASYNTLKKLAAVPV
RVDELGRVWRVMPN
SEQ ID NO: 335
METTLGIDLGTNSIGLALVDQEEHQILYSGVRIFPEGINKDTIGLGEKEESRNATRRAKRQMRR
QYFRKKLRKAKLLELLIAYDMCPLKPEDVRRWKNWDKQQKSTVRQFPDTPAFREWLKQNPYELR
KQAVTEDVTRPELGRILYQMIQRRGFLSSRKGKEEGKIFTGKDRMVGIDETRKNLQKQTLGAYL
YDIAPKNGEKYRFRTERVRARYTLRDMYIREFEIIWQRQAGHLGLAHEQATRKKNIFLEGSATN
VRNSKLITHLQAKYGRGHVLIEDTRITVTFQLPLKEVLGGKIEIEEEQLKFKSNESVLFWQRPL
RSQKSLLSKCVFEGRNFYDPVHQKWIIAGPTPAPLSHPEFEEFRAYQFINNIIYGKNEHLTAIQ
REAVFELMCTESKDFNFEKIPKHLKLFEKFNFDDTTKVPACTTISQLRKLFPHPVWEEKREEIW
HCFYFYDDNTLLFEKLQKDYALQTNDLEKIKKIRLSESYGNVSLKAIRRINPYLKKGYAYSTAV
LLGGIRNSFGKRFEYFKEYEPEIEKAVCRILKEKNAEGEVIRKIKDYLVHNRFGFAKNDRAFQK
LYHHSQAITTQAQKERLPETGNLRNPIVQQGLNELRRTVNKLLATCREKYGPSFKFDHIHVEMG
RELRSSKTEREKQSRQIRENEKKNEAAKVKLAEYGLKAYRDNIQKYLLYKEIEEKGGTVCCPYT
GKTLNISHTLGSDNSVQIEHIIPYSISLDDSLANKTLCDATFNREKGELTPYDFYQKDPSPEKW
GASSWEEIEDRAFRLLPYAKAQRFIRRKPQESNEFISRQLNDTRYISKKAVEYLSAICSDVKAF
PGQLTAELRHLWGLNNILQSAPDITFPLPVSATENHREYYVITNEQNEVIRLFPKQGETPRTEK
GELLLTGEVERKVFRCKGMQEFQTDVSDGKYWRRIKLSSSVTWSPLFAPKPISADGQIVLKGRI
EKGVFVCNQLKQKLKTGLPDGSYWISLPVISQTFKEGESVNNSKLTSQQVQLFGRVREGIFRCH
NYQCPASGADGNFWCTLDTDTAQPAFTPIKNAPPGVGGGQIILTGDVDDKGIFHADDDLHYELP
ASLPKGKYYGIFTVESCDPTLIPIELSAPKTSKGENLIEGNIWVDEHTGEVRFDPKKNREDQRH
HAIDAIVIALSSQSLFQRLSTYNARRENKKRGLDSTEHFPSPWPGFAQDVRQSVVPLLVSYKQN
PKTLCKISKTLYKDGKKIHSCGNAVRGQLHKETVYGQRTAPGATEKSYHIRKDIRELKTSKHIG
KVVDITIRQMLLKHLQENYHIDITQEFNIPSNAFFKEGVYRIFLPNKHGEPVPIKKIRMKEELG
NAERLKDNINQYVNPRNNHHVMIYQDADGNLKEEIVSFWSVIERQNQGQPIYQLPREGRNIVSI
LQINDTFLIGLKEEEPEVYRNDLSTLSKHLYRVQKLSGMYYTFRHHLASTLNNEREEFRIQSLE
AWKRANPVKVQIDEIGRITFLNGPLC
SEQ ID NO: 336
MESSQILSPIGIDLGGKFTGVCLSHLEAFAELPNHANTKYSVILIDHNNFQLSQAQRRATRHRV
RNKKRNQFVKRVALQLFQHILSRDLNAKEETALCHYLNNRGYTYVDTDLDEYIKDETTINLLKE
LLPSESEHNFIDWFLQKMQSSEFRKILVSKVEEKKDDKELKNAVKNIKNFITGFEKNSVEGHRH
RKVYFENIKSDITKDNQLDSIKKKIPSVCLSNLLGHLSNLQWKNLHRYLAKNPKQFDEQTFGNE
FLRMLKNFRHLKGSQESLAVRNLIQQLEQSQDYISILEKTPPEITIPPYEARTNTGMEKDQSLL
LNPEKLNNLYPNWRNLIPGIIDAHPFLEKDLEHTKLRDRKRIISPSKQDEKRDSYILQRYLDLN
KKIDKFKIKKQLSFLGQGKQLPANLIETQKEMETHFNSSLVSVLIQIASAYNKEREDAAQGIWF
DNAFSLCELSNINPPRKQKILPLLVGAILSEDFINNKDKWAKFKIFWNTHKIGRTSLKSKCKEI
EEARKNSGNAFKIDYEEALNHPEHSNNKALIKIIQTIPDIIQAIQSHLGHNDSQALIYHNPFSL
SQLYTILETKRDGFHKNCVAVTCENYWRSQKTEIDPEISYASRLPADSVRPFDGVLARMMQRLA
YEIAMAKWEQIKHIPDNSSLLIPIYLEQNRFEFEESFKKIKGSSSDKTLEQAIEKQNIQWEEKF
QRIINASMNICPYKGASIGGQGEIDHIYPRSLSKKHFGVIFNSEVNLIYCSSQGNREKKEEHYL
LEHLSPLYLKHQFGTDNVSDIKNFISQNVANIKKYISFHLLTPEQQKAARHALFLDYDDEAFKT
ITKFLMSQQKARVNGTQKFLGKQIMEFLSTLADSKQLQLEFSIKQITAEEVHDHRELLSKQEPK
LVKSRQQSFPSHAIDATLTMSIGLKEFPQFSQELDNSWFINHLMPDEVHLNPVRSKEKYNKPNI
SSTPLFKDSLYAERFIPVWVKGETFAIGFSEKDLFEIKPSNKEKLFTLLKTYSTKNPGESLQEL
QAKSKAKWLYFPINKTLALEFLHHYFHKEIVTPDDTTVCHFINSLRYYTKKESITVKILKEPMP
VLSVKFESSKKNVLGSFKHTIALPATKDWERLFNHPNFLALKANPAPNPKEFNEFIRKYFLSDN
NPNSDIPNNGHNIKPQKHKAVRKVFSLPVIPGNAGTMMRIRRKDNKGQPLYQLQTIDDTPSMGI
QINEDRLVKQEVLMDAYKTRNLSTIDGINNSEGQAYATFDNWLTLPVSTFKPEIIKLEMKPHSK
TRRYIRITQSLADFIKTIDEALMIKPSDSIDDPLNMPNEIVCKNKLFGNELKPRDGKMKIVSTG
KIVTYEFESDSTPQWIQTLYVTQLKKQP
SEQ ID NO: 337
MKKIVGLDLGTNSIGWALINAYINKEHLYGIEACGSRIIPMDAAILGNFDKGNSISQTADRTSY
RGIRRLRERHLLRRERLHRILDLLGFLPKHYSDSLNRYGKFLNDIECKLPWVKDETGSYKFIFQ
ESFKEMLANFTEHHPILIANNKKVPYDWTIYYLRKKALTQKISKEELAWILLNFNQKRGYYQLR
GEEEETPNKLVEYYSLKVEKVEDSGERKGKDTWYNVHLENGMIYRRTSNIPLDWEGKTKEFIVT
TDLEADGSPKKDKEGNIKRSFRAPKDDDWTLIKKKTEADIDKIKMTVGAYIYDTLLQKPDQKIR
GKLVRTIERKYYKNELYQILKTQSEFHEELRDKQLYIACLNELYPNNEPRRNSISTRDFCHLFI
EDIIFYQRPLKSKKSLIDNCPYEENRYIDKESGEIKHASIKCIAKSHPLYQEFRLWQFIVNLRI
YRKETDVDVTQELLPTEADYVTLFEWLNEKKEIDQKAFFKYPPFGFKKTTSNYRWNYVEDKPYP
CNETHAQIIARLGKAHIPKAFLSKEKEETLWHILYSIEDKQEIEKALHSFANKNNLSEEFIEQF
KNFPPFKKEYGSYSAKAIKKLLPLMRMGKYWSIENIDNGTRIRINKIIDGEYDENIRERVRQKA
INLTDITHFRALPLWLACYLVYDRHSEVKDIVKWKTPKDIDLYLKSFKQHSLRNPIVEQVITET
LRTVRDIWQQVGHIDEIHIELGREMKNPADKRARMSQQMIKNENTNLRIKALLTEFLNPEFGIE
NVRPYSPSQQDLLRIYEEGVLNSILELPEDIGIILGKFNQTDTLKRPTRSEILRYKLWLEQKYR
SPYTGEMIPLSKLFTPAYEIEHIIPQSRYFDDSLSNKVICESEINKLKDRSLGYEFIKNHHGEK
VELAFDKPVEVLSVEAYEKLVHESYSHNRSKMKKLLMEDIPDQFIERQLNDSRYISKVVKSLLS
NIVREENEQEAISKNVIPCTGGITDRLKKDWGINDVWNKIVLPRFIRLNELTESTRFTSINTNN
TMIPSMPLELQKGFNKKRIDHRHHAMDAIIIACANRNIVNYLNNVSASKNTKITRRDLQTLLCH
KDKTDNNGNYKWVIDKPWETFTQDTLTALQKITVSFKQNLRVINKTTNHYQHYENGKKIVSNQS
KGDSWAIRKSMHKETVHGEVNLRMIKTVSFNEALKKPQAIVEMDLKKKILAMLELGYDTKRIKN
YFEENKDTWQDINPSKIKVYYFTKETKDRYFAVRKPIDTSFDKKKIKESITDTGIQQIMLRHLE
TKDNDPTLAFSPDGIDEMNRNILILNKGKKHQPIYKVRVYEKAEKFTVGQKGNKRTKFVEAAKG
TNLFFAIYETEEIDKDTKKVIRKRSYSTIPLNVVIERQKQGLSSAPEDENGNLPKYILSPNDLV
YVPTQEEINKGEVVMPIDRDRIYKMVDSSGITANFIPASTANLIFALPKATAEIYCNGENCIQN
EYGIGSPQSKNQKAITGEMVKEICFPIKVDRLGNIIQVGSCILTN
SEQ ID NO: 338
MSRSLTFSFDIGYASIGWAVIASASHDDADPSVCGCGTVLFPKDDCQAFKRREYRRLRRNIRSR
RVRIERIGRLLVQAQIITPEMKETSGHPAPFYLASEALKGHRTLAPIELWHVLRWYAHNRGYDN
NASWSNSLSEDGGNGEDTERVKHAQDLMDKHGTATMAETICRELKLEEGKADAPMEVSTPAYKN
LNTAFPRLIVEKEVRRILELSAPLIPGLTAEIIELIAQHHPLTTEQRGVLLQHGIKLARRYRGS
LLFGQLIPRFDNRIISRCPVTWAQVYEAELKKGNSEQSARERAEKLSKVPTANCPEFYEYRMAR
ILCNIRADGEPLSAEIRRELMNQARQEGKLTKASLEKAISSRLGKETETNVSNYFTLHPDSEEA
LYLNPAVEVLQRSGIGQILSPSVYRIAANRLRRGKSVTPNYLLNLLKSRGESGEALEKKIEKES
KKKEADYADTPLKPKYATGRAPYARTVLKKVVEEILDGEDPTRPARGEAHPDGELKAHDGCLYC
LLDTDSSVNQHQKERRLDTMTNNHLVRHRMLILDRLLKDLIQDFADGQKDRISRVCVEVGKELT
TFSAMDSKKIQRELTLRQKSHTDAVNRLKRKLPGKALSANLIRKCRIAMDMNWTCPFTGATYGD
HELENLELEHIVPHSFRQSNALSSLVLTWPGVNRMKGQRTGYDFVEQEQENPVPDKPNLHICSL
NNYRELVEKLDDKKGHEDDRRRKKKRKALLMVRGLSHKHQSQNHEAMKEIGMTEGMMTQSSHLM
KLACKSIKTSLPDAHIDMIPGAVTAEVRKAWDVFGVFKELCPEAADPDSGKILKENLRSLTHLH
HALDACVLGLIPYIIPAHHNGLLRRVLAMRRIPEKLIPQVRPVANQRHYVLNDDGRMMLRDLSA
SLKENIREQLMEQRVIQHVPADMGGALLKETMQRVLSVDGSGEDAMVSLSKKKDGKKEKNQVKA
SKLVGVFPEGPSKLKALKAAIEIDGNYGVALDPKPVVIRHIKVFKRIMALKEQNGGKPVRILKK
GMLIHLTSSKDPKHAGVWRIESIQDSKGGVKLDLQRAHCAVPKNKTHECNWREVDLISLLKKYQ
MKRYPTSYTGTPR
SEQ ID NO: 339
MTQKVLGLDLGTNSIGSAVRNLDLSDDLQWQLEFFSSDIFRSSVNKESNGREYSLAAQRSAHRR
SRGLNEVRRRRLWATLNLLIKHGFCPMSSESLMRWCTYDKRKGLFREYPIDDKDFNAWILLDFN
GDGRPDYSSPYQLRRELVTRQFDFEQPIERYKLGRALYHIAQHRGFKSSKGETLSQQETNSKPS
STDEIPDVAGAMKASEEKLSKGLSTYMKEHNLLTVGAAFAQLEDEGVRVRNNNDYRAIRSQFQH
EIETIFKFQQGLSVESELYERLISEKKNVGTIFYKRPLRSQRGNVGKCTLERSKPRCAIGHPLF
EKFRAWTLINNIKVRMSVDTLDEQLPMKLRLDLYNECFLAFVRTEFKFEDIRKYLEKRLGIHFS
YNDKTINYKDSTSVAGCPITARFRKMLGEEWESFRVEGQKERQAHSKNNISFHRVSYSIEDIWH
FCYDAEEPEAVLAFAQETLRLERKKAEELVRIWSAMPQGYAMLSQKAIRNINKILMLGLKYSDA
VILAKVPELVDVSDEELLSIAKDYYLVEAQVNYDKRINSIVNGLIAKYKSVSEEYRFADHNYEY
LLDESDEKDIIRQIENSLGARRWSLMDANEQTDILQKVRDRYQDFFRSHERKFVESPKLGESFE
NYLTKKFPMVEREQWKKLYHPSQITIYRPVSVGKDRSVLRLGNPDIGAIKNPTVLRVLNTLRRR
VNQLLDDGVISPDETRVVVETARELNDANRKWALDTYNRIRHDENEKIKKILEEFYPKRDGIST
DDIDKARYVIDQREVDYFTGSKTYNKDIKKYKFWLEQGGQCMYTGRTINLSNLFDPNAFDIEHT
IPESLSFDSSDMNLTLCDAHYNRFIKKNHIPTDMPNYDKAITIDGKEYPAITSQLQRWVERVER
LNRNVEYWKGQARRAQNKDRKDQCMREMHLWKMELEYWKKKLERFTVTEVTDGFKNSQLVDTRV
ITRHAVLYLKSIFPHVDVQRGDVTAKFRKILGIQSVDEKKDRSLHSHHAIDATTLTIIPVSAKR
DRMLELFAKIEEINKMLSFSGSEDRTGLIQELEGLKNKLQMEVKVCRIGHNVSEIGTFINDNII
VNHHIKNQALTPVRRRLRKKGYIVGGVDNPRWQTGDALRGEIHKASYYGAITQFAKDDEGKVLM
KEGRPQVNPTIKFVIRRELKYKKSAADSGFASWDDLGKAIVDKELFALMKGQFPAETSFKDACE
QGIYMIKKGKNGMPDIKLHHIRHVRCEAPQSGLKIKEQTYKSEKEYKRYFYAAVGDLYAMCCYT
NGKIREFRIYSLYDVSCHRKSDIEDIPEFITDKKGNRLMLDYKLRTGDMILLYKDNPAELYDLD
NVNLSRRLYKINRFESQSNLVLMTHHLSTSKERGRSLGKTVDYQNLPESIRSSVKSLNFLIMGE
NRDFVIKNGKIIFNHR
SEQ ID NO: 340
MLVSPISVDLGGKNTGFFSFTDSLDNSQSGTVIYDESFVLSQVGRRSKRHSKRNNLRNKLVKRL
FLLILQEHHGLSIDVLPDEIRGLFNKRGYTYAGFELDEKKKDALESDTLKEFLSEKLQSIDRDS
DVEDFLNQIASNAESFKDYKKGFEAVFASATHSPNKKLELKDELKSEYGENAKELLAGLRVTKE
ILDEFDKQENQGNLPRAKYFEELGEYIATNEKVKSFFDSNSLKLTDMTKLIGNISNYQLKELRR
YFNDKEMEKGDIWIPNKLHKITERFVRSWHPKNDADRQRRAELMKDLKSKEIMELLTTTEPVMT
IPPYDDMNNRGAVKCQTLRLNEEYLDKHLPNWRDIAKRLNHGKFNDDLADSTVKGYSEDSTLLH
RLLDTSKEIDIYELRGKKPNELLVKTLGQSDANRLYGFAQNYYELIRQKVRAGIWVPVKNKDDS
LNLEDNSNMLKRCNHNPPHKKNQIHNLVAGILGVKLDEAKFAEFEKELWSAKVGNKKLSAYCKN
IEELRKTHGNTFKIDIEELRKKDPAELSKEEKAKLRLTDDVILNEWSQKIANFFDIDDKHRQRF
NNLFSMAQLHTVIDTPRSGFSSTCKRCTAENRFRSETAFYNDETGEFHKKATATCQRLPADTQR
PFSGKIERYIDKLGYELAKIKAKELEGMEAKEIKVPIILEQNAFEYEESLRKSKTGSNDRVINS
KKDRDGKKLAKAKENAEDRLKDKDKRIKAFSSGICPYCGDTIGDDGEIDHILPRSHTLKIYGTV
FNPEGNLIYVHQKCNQAKADSIYKLSDIKAGVSAQWIEEQVANIKGYKTFSVLSAEQQKAFRYA
LFLQNDNEAYKKVVDWLRTDQSARVNGTQKYLAKKIQEKLTKMLPNKHLSFEFILADATEVSEL
RRQYARQNPLLAKAEKQAPSSHAIDAVMAFVARYQKVFKDGTPPNADEVAKLAMLDSWNPASNE
PLTKGLSTNQKIEKMIKSGDYGQKNMREVFGKSIFGENAIGERYKPIVVQEGGYYIGYPATVKK
GYELKNCKVVTSKNDIAKLEKIIKNQDLISLKENQYIKIFSINKQTISELSNRYFNMNYKNLVE
RDKEIVGLLEFIVENCRYYTKKVDVKFAPKYIHETKYPFYDDWRRFDEAWRYLQENQNKTSSKD
RFVIDKSSLNEYYQPDKNEYKLDVDTQPIWDDFCRWYFLDRYKTANDKKSIRIKARKTFSLLAE
SGVQGKVFRAKRKIPTGYAYQALPMDNNVIAGDYANILLEANSKTLSLVPKSGISIEKQLDKKL
DVIKKTDVRGLAIDNNSFFNADFDTHGIRLIVENTSVKVGNFPISAIDKSAKRMIFRALFEKEK
GKRKKKTTISFKESGPVQDYLKVFLKKIVKIQLRTDGSISNIVVRKNAADFTLSFRSEHIQKLL
K
SEQ ID NO: 341
MAYRLGLDIGITSVGWAVVALEKDESGLKPVRIQDLGVRIFDKAEDSKTGASLALPRREARSAR
RRTRRRRHRLWRVKRLLEQHGILSMEQIEALYAQRTSSPDVYALRVAGLDRCLIAEEIARVLIH
IAHRRGFQSNRKSEIKDSDAGKLLKAVQENENLMQSKGYRTVAEMLVSEATKTDAEGKLVHGKK
HGYVSNVRNKAGEYRHTVSRQAIVDEVRKIFAAQRALGNDVMSEELEDSYLKILCSQRNFDDGP
GGDSPYGHGSVSPDGVRQSIYERMVGSCTFETGEKRAPRSSYSFERFQLLTKVVNLRIYRQQED
GGRYPCELTQTERARVIDCAYEQTKITYGKLRKLLDMKDTESFAGLTYGLNRSRNKTEDTVFVE
MKFYHEVRKALQRAGVFIQDLSIETLDQIGWILSVWKSDDNRRKKLSTLGLSDNVIEELLPLNG
SKFGHLSLKAIRKILPFLEDGYSYDVACELAGYQFQGKTEYVKQRLLPPLGEGEVTNPVVRRAL
SQAIKVVNAVIRKHGSPESIHIELARELSKNLDERRKIEKAQKENQKNNEQIKDEIREILGSAH
VTGRDIVKYKLFKQQQEFCMYSGEKLDVTRLFEPGYAEVDHIIPYGISFDDSYDNKVLVKTEQN
RQKGNRTPLEYLRDKPEQKAKFIALVESIPLSQKKKNHLLMDKRAIDLEQEGFRERNLSDTRYI
TRALMNHIQAWLLFDETASTRSKRVVCVNGAVTAYMRARWGLTKDRDAGDKHHAADAVVVACIG
DSLIQRVTKYDKFKRNALADRNRYVQQVSKSEGITQYVDKETGEVFTWESFDERKFLPNEPLEP
WPFFRDELLARLSDDPSKNIRAIGLLTYSETEQIDPIFVSRMPTRKVTGAAHKETIRSPRIVKV
DDNKGTEIQVVVSKVALTELKLTKDGEIKDYFRPEDDPRLYNTLRERLVQFGGDAKAAFKEPVY
KISKDGSVRTPVRKVKIQEKLTLGVPVHGGRGIAENGGMVRIDVFAKGGKYYFVPIYVADVLKR
ELPNRLATAHKPYSEWRVVDDSYQFKFSLYPNDAVMIKPSREVDITYKDRKEPVGCRIMYFVSA
NIASASISLRTHDNSGELEGLGIQGLEVFEKYVVGPLGDTHPVYKERRMPFRVERKMN
SEQ ID NO: 342
MPVLSPLSPNAAQGRRRWSLALDIGEGSIGWAVAEVDAEGRVLQLTGTGVTLFPSAWSNENGTY
VAHGAADRAVRGQQQRHDSRRRRLAGLARLCAPVLERSPEDLKDLTRTPPKADPRAIFFLRADA
ARRPLDGPELFRVLHHMAAHRGIRLAELQEVDPPPESDADDAAPAATEDEDGTRRAAADERAFR
RLMAEHMHRHGTQPTCGEIMAGRLRETPAGAQPVTRARDGLRVGGGVAVPTRALIEQEFDAIRA
IQAPRHPDLPWDSLRRLVLDQAPIAVPPATPCLFLEELRRRGETFQGRTITREAIDRGLTVDPL
IQALRIRETVGNLRLHERITEPDGRQRYVPRAMPELGLSHGELTAPERDTLVRALMHDPDGLAA
KDGRIPYTRLRKLIGYDNSPVCFAQERDTSGGGITVNPTDPLMARWIDGWVDLPLKARSLYVRD
VVARGADSAALARLLAEGAHGVPPVAAAAVPAATAAILESDIMQPGRYSVCPWAAEAILDAWAN
APTEGFYDVTRGLFGFAPGEIVLEDLRRARGALLAHLPRTMAAARTPNRAAQQRGPLPAYESVI
PSQLITSLRRAHKGRAADWSAADPEERNPFLRTWTGNAATDHILNQVRKTANEVITKYGNRRGW
DPLPSRITVELAREAKHGVIRRNEIAKENRENEGRRKKESAALDTFCQDNTVSWQAGGLPKERA
ALRLRLAQRQEFFCPYCAERPKLRATDLFSPAETEIDHVIERRMGGDGPDNLVLAHKDCNNAKG
KKTPHEHAGDLLDSPALAALWQGWRKENADRLKGKGHKARTPREDKDFMDRVGWRFEEDARAKA
EENQERRGRRMLHDTARATRLARLYLAAAVMPEDPAEIGAPPVETPPSPEDPTGYTAIYRTISR
VQPVNGSVTHMLRQRLLQRDKNRDYQTHHAEDACLLLLAGPAVVQAFNTEAAQHGADAPDDRPV
DLMPTSDAYHQQRRARALGRVPLATVDAALADIVMPESDRQDPETGRVHWRLTRAGRGLKRRID
DLTRNCVILSRPRRPSETGTPGALHNATHYGRREITVDGRTDTVVTQRMNARDLVALLDNAKIV
PAARLDAAAPGDTILKEICTEIADRHDRVVDPEGTHARRWISARLAALVPAHAEAVARDIAELA
DLDALADADRTPEQEARRSALRQSPYLGRAISAKKADGRARAREQEILTRALLDPHWGPRGLRH
LIMREARAPSLVRIRANKTDAFGRPVPDAAVWVKTDGNAVSQLWRLTSVVTDDGRRIPLPKPIE
KRIEISNLEYARLNGLDEGAGVTGNNAPPRPLRQDIDRLTPLWRDHGTAPGGYLGTAVGELEDK
ARSALRGKAMRQTLTDAGITAEAGWRLDSEGAVCDLEVAKGDTVKKDGKTYKVGVITQGIFGMP
VDAAGSAPRTPEDCEKFEEQYGIKPWKAKGIPLA
SEQ ID NO: 343
MNYTEKEKLFMKYILALDIGIASVGWAILDKESETVIEAGSNIFPEASAADNQLRRDMRGAKRN
NRRLKTRINDFIKLWENNNLSIPQFKSTEIVGLKVRAITEEITLDELYLILYSYLKHRGISYLE
DALDDTVSGSSAYANGLKLNAKELETHYPCEIQQERLNTIGKYRGQSQIINENGEVLDLSNVFT
IGAYRKEIQRVFEIQKKYHPELTDEFCDGYMLIFNRKRKYYEGPGNEKSRTDYGRFTTKLDANG
NYITEDNIFEKLIGKCSVYPDELRAAAASYTAQEYNVLNDLNNLTINGRKLEENEKHEIVERIK
SSNTINMRKIISDCMGENIDDFAGARIDKSGKEIFHKFEVYNKMRKALLEIGIDISNYSREELD
EIGYIMTINTDKEAMMEAFQKSWIDLSDDVKQCLINMRKTNGALFNKWQSFSLKIMNELIPEMY
AQPKEQMTLLTEMGVTKGTQEEFAGLKYIPVDVVSEDIFNPVVRRSVRISFKILNAVLKKYKAL
DTIVIEMPRDRNSEEQKKRINDSQKLNEKEMEYIEKKLAVTYGIKLSPSDFSSQKQLSLKLKLW
NEQDGICLYSGKTIDPNDIINNPQLFEIDHIIPRSISFDDARSNKVLVYRSENQKKGNQTPYYY
LTHSHSEWSFEQYKATVMNLSKKKEYAISRKKIQNLLYSEDITKMDVLKGFINRNINDTSYASR
LVLNTIQNFFMANEADTKVKVIKGSYTHQMRCNLKLDKNRDESYSHHAVDAMLIGYSELGYEAY
HKLQGEFIDFETGEILRKDMWDENMSDEVYADYLYGKKWANIRNEVVKAEKNVKYWHYVMRKSN
RGLCNQTIRGTREYDGKQYKINKLDIRTKEGIKVFAKLAFSKKDSDRERLLVYLNDRRTFDDLC
KIYEDYSDAANPFVQYEKETGDIIRKYSKKHNGPRIDKLKYKDGEVGACIDISHKYGFEKGSKK
VILESLVPYRMDVYYKEENHSYYLVGVKQSDIKFEKGRNVIDEEAYARILVNEKMIQPGQSRAD
LENLGFKFKLSFYKNDIIEYEKDGKIYTERLVSRTMPKQRNYIETKPIDKAKFEKQNLVGLGKT
KFIKKYRYDILGNKYSCSEEKFTSFC
SEQ ID NO: 344
MLRLYCANNLVLNNVQNLWKYLLLLIFDKKIIFLFKIKVILIRRYMENNNKEKIVIGFDLGVAS
VGWSIVNAETKEVIDLGVRLFSEPEKADYRRAKRTTRRLLRRKKFKREKFHKLILKNAEIFGLQ
SRNEILNVYKDQSSKYRNILKLKINALKEEIKPSELVWILRDYLQNRGYFYKNEKLTDEFVSNS
FPSKKLHEHYEKYGFFRGSVKLDNKLDNKKDKAKEKDEEEESDAKKESEELIFSNKQWINEIVK
VFENQSYLTESFKEEYLKLFNYVRPFNKGPGSKNSRTAYGVFSTDIDPETNKFKDYSNIWDKTI
GKCSLFEEEIRAPKNLPSALIFNLQNEICTIKNEFTEFKNWWLNAEQKSEILKFVFTELFNWKD
KKYSDKKFNKNLQDKIKKYLLNFALENFNLNEEILKNRDLENDTVLGLKGVKYYEKSNATADAA
LEFSSLKPLYVFIKFLKEKKLDLNYLLGLENTEILYFLDSIYLAISYSSDLKERNEWFKKLLKE
LYPKIKNNNLEIIENVEDIFEITDQEKFESFSKTHSLSREAFNHIIPLLLSNNEGKNYESLKHS
NEELKKRTEKAELKAQQNQKYLKDNFLKEALVPLSVKTSVLQAIKIFNQIIKNFGKKYEISQVV
IEMARELTKPNLEKLLNNATNSNIKILKEKLDQTEKFDDFTKKKFIDKIENSVVFRNKLFLWFE
QDRKDPYTQLDIKINEIEDETEIDHVIPYSKSADDSWFNKLLVKKSTNQLKKNKTVWEYYQNES
DPEAKWNKFVAWAKRIYLVQKSDKESKDNSEKNSIFKNKKPNLKFKNITKKLFDPYKDLGFLAR
NLNDTRYATKVFRDQLNNYSKHHSKDDENKLFKVVCMNGSITSFLRKSMWRKNEEQVYRFNFWK
KDRDQFFHHAVDASIIAIFSLLTKTLYNKLRVYESYDVQRREDGVYLINKETGEVKKADKDYWK
DQHNFLKIRENAIEIKNVLNNVDFQNQVRYSRKANTKLNTQLFNETLYGVKEFENNFYKLEKVN
LFSRKDLRKFILEDLNEESEKNKKNENGSRKRILTEKYIVDEILQILENEEFKDSKSDINALNK
YMDSLPSKFSEFFSQDFINKCKKENSLILTFDAIKHNDPKKVIKIKNLKFFREDATLKNKQAVH
KDSKNQIKSFYESYKCVGFIWLKNKNDLEESIFVPINSRVIHFGDKDKDIFDFDSYNKEKLLNE
INLKRPENKKFNSINEIEFVKFVKPGALLLNFENQQIYYISTLESSSLRAKIKLLNKMDKGKAV
SMKKITNPDEYKIIEHVNPLGINLNWTKKLENNN
SEQ ID NO: 345
MLMSKHVLGLDLGVGSIGWCLIALDAQGDPAEILGMGSRVVPLNNATKAIEAFNAGAAFTASQE
RTARRTMRRGFARYQLRRYRLRRELEKVGMLPDAALIQLPLLELWELRERAATAGRRLTLPELG
RVLCHINQKRGYRHVKSDAAAIVGDEGEKKKDSNSAYLAGIRANDEKLQAEHKTVGQYFAEQLR
QNQSESPTGGISYRIKDQIFSRQCYIDEYDQIMAVQRVHYPDILTDEFIRMLRDEVIFMQRPLK
SCKHLVSLCEFEKQERVMRVQQDDGKGGWQLVERRVKFGPKVAPKSSPLFQLCCIYEAVNNIRL
TRPNGSPCDITPEERAKIVAHLQSSASLSFAALKKLLKEKALIADQLTSKSGLKGNSTRVALAS
ALQPYPQYHHLLDMELETRMMTVQLTDEETGEVTEREVAVVTDSYVRKPLYRLWHILYSIEERE
AMRRALITQLGMKEEDLDGGLLDQLYRLDFVKPGYGNKSAKFICKLLPQLQQGLGYSEACAAVG
YRHSNSPTSEEITERTLLEKIPLLQRNELRQPLVEKILNQMINLVNALKAEYGIDEVRVELARE
LKMSREERERMARNNKDREERNKGVAAKIRECGLYPTKPRIQKYMLWKEAGRQCLYCGRSIEEE
QCLREGGMEVEHIIPKSVLYDDSYGNKTCACRRCNKEKGNRTALEYIRAKGREAEYMKRINDLL
KEKKISYSKHQRLRWLKEDIPSDFLERQLRLTQYISRQAMAILQQGIRRVSASEGGVTARLRSL
WGYGKILHTLNLDRYDSMGETERVSREGEATEELHITNWSKRMDHRHHAIDALVVACTRQSYIQ
RLNRLSSEFGREDKKKEDQEAQEQQATETGRLSNLERWLTQRPHFSVRTVSDKVAEILISYRPG
QRVVTRGRNIYRKKMADGREVSCVQRGVLVPRGELMEASFYGKILSQGRVRIVKRYPLHDLKGE
VVDPHLRELITTYNQELKSREKGAPIPPLCLDKDKKQEVRSVRCYAKTLSLDKAIPMCFDEKGE
PTAFVKSASNHHLALYRTPKGKLVESIVTFWDAVDRARYGIPLVITHPREVMEQVLQRGDIPEQ
VLSLLPPSDWVFVDSLQQDEMVVIGLSDEELQRALEAQNYRKISEHLYRVQKMSSSYYVFRYHL
ETSVADDKNTSGRIPKFHRVQSLKAYEERNIRKVRVDLLGRISLL
SEQ ID NO: 346
MSDLVLGLDIGIGSVGVGILNKVTGEIIHKNSRIFPAAQAENNLVRRTNRQGRRLARRKKHRRV
RLNRLFEESGLITDFTKISINLNPYQLRVKGLTDELSNEELFIALKNMVKHRGISYLDDASDDG
NSSVGDYAQIVKENSKQLETKTPGQIQLERYQTYGQLRGDFTVEKDGKKHRLINVFPTSAYRSE
ALRILQTQQEFNPQITDEFINRYLEILTGKRKYYHGPGNEKSRTDYGRYRTSGETLDNIFGILI
GKCTFYPDEFRAAKASYTAQEFNLLNDLNNLTVPTETKKLSKEQKNQIINYVKNEKAMGPAKLF
KYIAKLLSCDVADIKGYRIDKSGKAEIHTFEAYRKMKTLETLDIEQMDRETLDKLAYVLTLNTE
REGIQEALEHEFADGSFSQKQVDELVQFRKANSSIFGKGWHNFSVKLMMELIPELYETSEEQMT
ILTRLGKQKTTSSSNKTKYIDEKLLTEEIYNPVVAKSVRQAIKIVNAAIKEYGDFDNIVIEMAR
ETNEDDEKKAIQKIQKANKDEKDAAMLKAANQYNGKAELPHSVFHGHKQLATKIRLWHQQGERC
LYTGKTISIHDLINNSNQFEVDHILPLSITFDDSLANKVLVYATANQEKGQRTPYQALDSMDDA
WSFRELKAFVRESKTLSNKKKEYLLTEEDISKFDVRKKFIERNLVDTRYASRVVLNALQEHFRA
HKIDTKVSVVRGQFTSQLRRHWGIEKTRDTYHHHAVDALIIAASSQLNLWKKQKNTLVSYSEDQ
LLDIETGELISDDEYKESVFKAPYQHFVDTLKSKEFEDSILFSYQVDSKFNRKISDATIYATRQ
AKVGKDKADETYVLGKIKDIYTQDGYDAFMKIYKKDKSKFLMYRHDPQTFEKVIEPILENYPNK
QINEKGKEVPCNPFLKYKEEHGYIRKYSKKGNGPEIKSLKYYDSKLGNHIDITPKDSNNKVVLQ
SVSPWRADVYFNKTTGKYEILGLKYADLQFEKGTGTYKISQEKYNDIKKKEGVDSDSEFKFTLY
KNDLLLVKDTETKEQQLFRFLSRTMPKQKHYVELKPYDKQKFEGGEALIKVLGNVANSGQCKKG
LGKSNISIYKVRTDVLGNQHIIKNEGDKPKLDF
SEQ ID NO: 347
MNAEHGKEGLLIMEENFQYRIGLDIGITSVGWAVLQNNSQDEPVRITDLGVRIFDVAENPKNGD
ALAAPRRDARTTRRRLRRRRHRLERIKFLLQENGLIEMDSFMERYYKGNLPDVYQLRYEGLDRK
LKDEELAQVLIHIAKHRGFRSTRKAETKEKEGGAVLKATTENQKIMQEKGYRTVGEMLYLDEAF
HTECLWNEKGYVLTPRNRPDDYKHTILRSMLVEEVHAIFAAQRAHGNQKATEGLEEAYVEIMTS
QRSFDMGPGLQPDGKPSPYAMEGFGDRVGKCTFEKDEYRAPKATYTAELFVALQKINHTKLIDE
FGTGRFFSEEERKTIIGLLLSSKELKYGTIRKKLNIDPSLKFNSLNYSAKKEGETEEERVLDTE
KAKFASMFWTYEYSKCLKDRTEEMPVGEKADLFDRIGEILTAYKNDDSRSSRLKELGLSGEEID
GLLDLSPAKYQRVSLKAMRKMQPYLEDGLIYDKACEAAGYDFRALNDGNKKHLLKGEEINAIVN
DITNPVVKRSVSQTIKVINAIIQKYGSPQAVNIELAREMSKNFQDRTNLEKEMKKRQQENERAK
QQIIELGKQNPTGQDILKYRLWNDQGGYCLYSGKKIPLEELFDGGYDIDHILPYSITFDDSYRN
KVLVTAQENRQKGNRTPYEYFGADEKRWEDYEASVRLLVRDYKKQQKLLKKNFTEEERKEFKER
NLNDTKYITRVVYNMIRQNLELEPFNHPEKKKQVWAVNGAVTSYLRKRWGLMQKDRSTDRHHAM
DAVVIACCTDGMIHKISRYMQGRELAYSRNFKFPDEETGEILNRDNFTREQWDEKFGVKVPLPW
NSFRDELDIRLLNEDPKNFLLTHADVQRELDYPGWMYGEEESPIEEGRYINYIRPLFVSRMPNH
KVTGSAHDATIRSARDYETRGVVITKVPLTDLKLNKDNEIEGYYDKDSDRLLYQALVRQLLLHG
NDGKKAFAEDFHKPKADGTEGPVVRKVKIEKKQTSGVMVRGGTGIAANGEMVRIDVFRENGKYY
FVPVYTADVVRKVLPNRAATHTKPYSEWRVMDDANFVFSLYSRDLIHVKSKKDIKTNLVNGGLL
LQKEIFAYYTGADIATASIAGFANDSNFKFRGLGIQSLEIFEKCQVDILGNISVVRHENRQEFH
SEQ ID NO: 348
MRVLGLDAGIASLGWALIEIEESNRGELSQGTIIGAGTWMFDAPEEKTQAGAKLKSEQRRTFRG
QRRVVRRRRQRMNEVRRILHSHGLLPSSDRDALKQPGLDPWRIRAEALDRLLGPVELAVALGHI
ARHRGFKSNSKGAKTNDPADDTSKMKRAVNETREKLARFGSAAKMLVEDESFVLRQTPTKNGAS
EIVRRFRNREGDYSRSLLRDDLAAEMRALFTAQARFQSAIATADLQTAFTKAAFFQRPLQDSEK
LVGPCPFEVDEKRAPKRGYSFELFRFLSRLNHVTLRDGKQERTLTRDELALAAADFGAAAKVSF
TALRKKLKLPETTVFVGVKADEESKLDVVARSGKAAEGTARLRSVIVDALGELAWGALLCSPEK
LDKIAEVISFRSDIGRISEGLAQAGCNAPLVDALTAAASDGRFDPFTGAGHISSKAARNILSGL
RQGMTYDKACCAADYDHTASRERGAFDVGGHGREALKRILQEERISRELVGSPTARKALIESIK
QVKAIVERYGVPDRIHVELARDVGKSIEEREEITRGIEKRNRQKDKLRGLFEKEVGRPPQDGAR
GKEELLRFELWSEQMGRCLYTDDYISPSQLVATDDAVQVDHILPWSRFADDSYANKTLCMAKAN
QDKKGRTPYEWFKAEKTDTEWDAFIVRVEALADMKGFKKRNYKLRNAEEAAAKFRNRNLNDTRW
ACRLLAEALKQLYPKGEKDKDGKERRRVFSRPGALTDRLRRAWGLQWMKKSTKGDRIPDDRHHA
LDAIVIAATTESLLQRATREVQEIEDKGLHYDLVKNVTPPWPGFREQAVEAVEKVFVARAERRR
ARGKAHDATIRHIAVREGEQRVYERRKVAELKLADLDRVKDAERNARLIEKLRNWIEAGSPKDD
PPLSPKGDPIFKVRLVTKSKVNIALDTGNPKRPGTVDRGEMARVDVFRKASKKGKYEYYLVPIY
PHDIATMKTPPIRAVQAYKPEDEWPEMDSSYEFCWSLVPMTYLQVISSKGEIFEGYYRGMNRSV
GAIQLSAHSNSSDVVQGIGARTLTEFKKFNVDRFGRKHEVERELRTWRGETWRGKAYI
SEQ ID NO: 349
MGNYYLGLDVGIGSIGWAVINIEKKRIEDFNVRIFKSGEIQEKNRNSRASQQCRRSRGLRRLYR
RKSHRKLRLKNYLSIIGLTTSEKIDYYYETADNNVIQLRNKGLSEKLTPEEIAACLIHICNNRG
YKDFYEVNVEDIEDPDERNEYKEEHDSIVLISNLMNEGGYCTPAEMICNCREFDEPNSVYRKFH
NSAASKNHYLITRHMLVKEVDLILENQSKYYGILDDKTIAKIKDIIFAQRDFEIGPGKNERFRR
FTGYLDSIGKCQFFKDQERGSRFTVIADIYAFVNVLSQYTYTNNRGESVFDTSFANDLINSALK
NGSMDKRELKAIAKSYHIDISDKNSDTSLTKCFKYIKVVKPLFEKYGYDWDKLIENYTDTDNNV
LNRIGIVLSQAQTPKRRREKLKALNIGLDDGLINELTKLKLSGTANVSYKYMQGSIEAFCEGDL
YGKYQAKFNKEIPDIDENAKPQKLPPFKNEDDCEFFKNPVVFRSINETRKLINAIIDKYGYPAA
VNIETADELNKTFEDRAIDTKRNNDNQKENDRIVKEIIECIKCDEVHARHLIEKYKLWEAQEGK
CLYSGETITKEDMLRDKDKLFEVDHIVPYSLILDNTINNKALVYAEENQKKGQRTPLMYMNEAQ
AADYRVRVNTMFKSKKCSKKKYQYLMLPDLNDQELLGGWRSRNLNDTRYICKYLVNYLRKNLRF
DRSYESSDEDDLKIRDHYRVFPVKSRFTSMFRRWWLNEKTWGRYDKAELKKLTYLDHAADAIII
ANCRPEYVVLAGEKLKLNKMYHQAGKRITPEYEQSKKACIDNLYKLFRMDRRTAEKLLSGHGRL
TPIIPNLSEEVDKRLWDKNIYEQFWKDDKDKKSCEELYRENVASLYKGDPKFASSLSMPVISLK
PDHKYRGTITGEEAIRVKEIDGKLIKLKRKSISEITAESINSIYTDDKILIDSLKTIFEQADYK
DVGDYLKKTNQHFFTTSSGKRVNKVTVIEKVPSRWLRKEIDDNNFSLLNDSSYYCIELYKDSKG
DNNLQGIAMSDIVHDRKTKKLYLKPDFNYPDDYYTHVMYIFPGDYLRIKSTSKKSGEQLKFEGY
FISVKNVNENSFRFISDNKPCAKDKRVSITKKDIVIKLAVDLMGKVQGENNGKGISCGEPLSLL
KEKN
SEQ ID NO: 350
MLSRQLLGASHLARPVSYSYNVQDNDVHCSYGERCFMRGKRYRIGIDVGLNSVGLAAVEVSDEN
SPVRLLNAQSVIHDGGVDPQKNKEAITRKNMSGVARRTRRMRRRKRERLHKLDMLLGKFGYPVI
EPESLDKPFEEWHVRAELATRYIEDDELRRESISIALRHMARHRGWRNPYRQVDSLISDNPYSK
QYGELKEKAKAYNDDATAAEEESTPAQLVVAMLDAGYAEAPRLRWRTGSKKPDAEGYLPVRLMQ
EDNANELKQIFRVQRVPADEWKPLFRSVFYAVSPKGSAEQRVGQDPLAPEQARALKASLAFQEY
RIANVITNLRIKDASAELRKLTVDEKQSIYDQLVSPSSEDITWSDLCDFLGFKRSQLKGVGSLT
EDGEERISSRPPRLTSVQRIYESDNKIRKPLVAWWKSASDNEHEAMIRLLSNTVDIDKVREDVA
YASAIEFIDGLDDDALTKLDSVDLPSGRAAYSVETLQKLTRQMLTTDDDLHEARKTLFNVTDSW
RPPADPIGEPLGNPSVDRVLKNVNRYLMNCQQRWGNPVSVNIEHVRSSFSSVAFARKDKREYEK
NNEKRSIFRSSLSEQLRADEQMEKVRESDLRRLEAIQRQNGQCLYCGRTITFRTCEMDHIVPRK
GVGSTNTRTNFAAVCAECNRMKSNTPFAIWARSEDAQTRGVSLAEAKKRVTMFTFNPKSYAPRE
VKAFKQAVIARLQQTEDDAAIDNRSIESVAWMADELHRRIDWYFNAKQYVNSASIDDAEAETMK
TTVSVFQGRVTASARRAAGIEGKIHFIGQQSKTRLDRRHHAVDASVIAMMNTAAAQTLMERESL
RESQRLIGLMPGERSWKEYPYEGTSRYESFHLWLDNMDVLLELLNDALDNDRIAVMQSQRYVLG
NSIAHDATIHPLEKVPLGSAMSADLIRRASTPALWCALTRLPDYDEKEGLPEDSHREIRVHDTR
YSADDEMGFFASQAAQIAVQEGSADIGSAIHHARVYRCWKTNAKGVRKYFYGMIRVFQTDLLRA
CHDDLFTVPLPPQSISMRYGEPRVVQALQSGNAQYLGSLVVGDEIEMDFSSLDVDGQIGEYLQF
FSQFSGGNLAWKHWVVDGFFNQTQLRIRPRYLAAEGLAKAFSDDVVPDGVQKIVTKQGWLPPVN
TASKTAVRIVRRNAFGEPRLSSAHHMPCSWQWRHE
SEQ ID NO: 351
MYSIGLDLGISSVGWSVIDERTGNVIDLGVRLFSAKNSEKNLERRTNRGGRRLIRRKTNRLKDA
KKILAAVGFYEDKSLKNSCPYQLRVKGLTEPLSRGEIYKVTLHILKKRGISYLDEVDTEAAKES
QDYKEQVRKNAQLLTKYTPGQIQLQRLKENNRVKTGINAQGNYQLNVFKVSAYANELATILKTQ
QAFYPNELTDDWIALFVQPGIAEEAGLIYRKRPYYHGPGNEANNSPYGRWSDFQKTGEPATNIF
DKLIGKDFQGELRASGLSLSAQQYNLLNDLTNLKIDGEVPLSSEQKEYILTELMTKEFTRFGVN
DVVKLLGVKKERLSGWRLDKKGKPEIHTLKGYRNWRKIFAEAGIDLATLPTETIDCLAKVLTLN
TEREGIENTLAFELPELSESVKLLVLDRYKELSQSISTQSWHRFSLKTLHLLIPELMNATSEQN
TLLEQFQLKSDVRKRYSEYKKLPTKDVLAEIYNPTVNKTVSQAFKVIDALLVKYGKEQIRYITI
EMPRDDNEEDEKKRIKELHAKNSQRKNDSQSYFMQKSGWSQEKFQTTIQKNRRFLAKLLYYYEQ
DGICAYTGLPISPELLVSDSTEIDHIIPISISLDDSINNKVLVLSKANQVKGQQTPYDAWMDGS
FKKINGKFSNWDDYQKWVESRHFSHKKENNLLETRNIFDSEQVEKFLARNLNDTRYASRLVLNT
LQSFFTNQETKVRVVNGSFTHTLRKKWGADLDKTRETHHHHAVDATLCAVTSFVKVSRYHYAVK
EETGEKVMREIDFETGEIVNEMSYWEFKKSKKYERKTYQVKWPNFREQLKPVNLHPRIKFSHQV
DRKANRKLSDATIYSVREKTEVKTLKSGKQKITTDEYTIGKIKDIYTLDGWEAFKKKQDKLLMK
DLDEKTYERLLSIAETTPDFQEVEEKNGKVKRVKRSPFAVYCEENDIPAIQKYAKKNNGPLIRS
LKYYDGKLNKHINITKDSQGRPVEKTKNGRKVTLQSLKPYRYDIYQDLETKAYYTVQLYYSDLR
FVEGKYGITEKEYMKKVAEQTKGQVVRFCFSLQKNDGLEIEWKDSQRYDVRFYNFQSANSINFK
GLEQEMMPAENQFKQKPYNNGAINLNIAKYGKEGKKLRKFNTDILGKKHYLFYEKEPKNIIK
SEQ ID NO: 352
MYFYKNKENKLNKKVVLGLDLGIASVGWCLTDISQKEDNKFPIILHGVRLFETVDDSDDKLLNE
TRRKKRGQRRRNRRLFTRKRDFIKYLIDNNIIELEFDKNPKILVRNFIEKYINPFSKNLELKYK
SVTNLPIGFHNLRKAAINEKYKLDKSELIVLLYFYLSLRGAFFDNPEDTKSKEMNKNEIEIFDK
NESIKNAEFPIDKIIEFYKISGKIRSTINLKFGHQDYLKEIKQVFEKQNIDFMNYEKFAMEEKS
FFSRIRNYSEGPGNEKSFSKYGLYANENGNPELIINEKGQKIYTKIFKTLWESKIGKCSYDKKL
YRAPKNSFSAKVFDITNKLTDWKHKNEYISERLKRKILLSRFLNKDSKSAVEKILKEENIKFEN
LSEIAYNKDDNKINLPIINAYHSLTTIFKKHLINFENYLISNENDLSKLMSFYKQQSEKLFVPN
EKGSYEINQNNNVLHIFDAISNILNKFSTIQDRIRILEGYFEFSNLKKDVKSSEIYSEIAKLRE
FSGTSSLSFGAYYKFIPNLISEGSKNYSTISYEEKALQNQKNNFSHSNLFEKTWVEDLIASPTV
KRSLRQTMNLLKEIFKYSEKNNLEIEKIVVEVTRSSNNKHERKKIEGINKYRKEKYEELKKVYD
LPNENTTLLKKLWLLRQQQGYDAYSLRKIEANDVINKPWNYDIDHIVPRSISFDDSFSNLVIVN
KLDNAKKSNDLSAKQFIEKIYGIEKLKEAKENWGNWYLRNANGKAFNDKGKFIKLYTIDNLDEF
DNSDFINRNLSDTSYITNALVNHLTFSNSKYKYSVVSVNGKQTSNLRNQIAFVGIKNNKETERE
WKRPEGFKSINSNDFLIREEGKNDVKDDVLIKDRSFNGHHAEDAYFITIISQYFRSFKRIERLN
VNYRKETRELDDLEKNNIKFKEKASFDNFLLINALDELNEKLNQMRFSRMVITKKNTQLFNETL
YSGKYDKGKNTIKKVEKLNLLDNRTDKIKKIEEFFDEDKLKENELTKLHIFNHDKNLYETLKII
WNEVKIEIKNKNLNEKNYFKYFVNKKLQEGKISFNEWVPILDNDFKIIRKIRYIKFSSEEKETD
EIIFSQSNFLKIDQRQNFSFHNTLYWVQIWVYKNQKDQYCFISIDARNSKFEKDEIKINYEKLK
TQKEKLQIINEEPILKINKGDLFENEEKELFYIVGRDEKPQKLEIKYILGKKIKDQKQIQKPVK
KYFPNWKKVNLTYMGEIFKK
SEQ ID NO: 353
MDNKNYRIGIDVGLNSIGFCAVEVDQHDTPLGFLNLSVYRHDAGIDPNGKKTNTTRLAMSGVAR
RTRRLFRKRKRRLAALDRFIEAQGWTLPDHADYKDPYTPWLVRAELAQTPIRDENDLHEKLAIA
VRHIARHRGWRSPWVPVRSLHVEQPPSDQYLALKERVEAKTLLQMPEGATPAEMVVALDLSVDV
NLRPKNREKTDTRPENKKPGFLGGKLMQSDNANELRKIAKIQGLDDALLRELIELVFAADSPKG
ASGELVGYDVLPGQHGKRRAEKAHPAFQRYRIASIVSNLRIRHLGSGADERLDVETQKRVFEYL
LNAKPTADITWSDVAEEIGVERNLLMGTATQTADGERASAKPPVDVTNVAFATCKIKPLKEWWL
NADYEARCVMVSALSHAEKLTEGTAAEVEVAEFLQNLSDEDNEKLDSFSLPIGRAAYSVDSLER
LTKRMIENGEDLFEARVNEFGVSEDWRPPAEPIGARVGNPAVDRVLKAVNRYLMAAEAEWGAPL
SVNIEHVREGFISKRQAVEIDRENQKRYQRNQAVRSQIADHINATSGVRGSDVTRYLAIQRQNG
ECLYCGTAITFVNSEMDHIVPRAGLGSTNTRDNLVATCERCNKSKSNKPFAVWAAECGIPGVSV
AEALKRVDFWIADGFASSKEHRELQKGVKDRLKRKVSDPEIDNRSMESVAWMARELAHRVQYYF
DEKHTGTKVRVFRGSLTSAARKASGFESRVNFIGGNGKTRLDRRHHAMDAATVAMLRNSVAKTL
VLRGNIRASERAIGAAETWKSFRGENVADRQIFESWSENMRVLVEKFNLALYNDEVSIFSSLRL
QLGNGKAHDDTITKLQMHKVGDAWSLTEIDRASTPALWCALTRQPDFTWKDGLPANEDRTIIVN
GTHYGPLDKVGIFGKAAASLLVRGGSVDIGSAIHHARIYRIAGKKPTYGMVRVFAPDLLRYRNE
DLFNVELPPQSVSMRYAEPKVREAIREGKAEYLGWLVVGDELLLDLSSETSGQIAELQQDFPGT
THWTVAGFFSPSRLRLRPVYLAQEGLGEDVSEGSKSIIAGQGWRPAVNKVFGSAMPEVIRRDGL
GRKRRFSYSGLPVSWQG
SEQ ID NO: 354
MRLGLDIGTSSIGWWLYETDGAGSDARITGVVDGGVRIFSDGRDPKSGASLAVDRRAARAMRRR
RDRYLRRRATLMKVLAETGLMPADPAEAKALEALDPFALRAAGLDEPLPLPHLGRALFHLNQRR
GFKSNRKTDRGDNESGKIKDATARLDMEMMANGARTYGEFLHKRRQKATDPRHVPSVRTRLSIA
NRGGPDGKEEAGYDFYPDRRHLEEEFHKLWAAQGAHHPELTETLRDLLFEKIFFQRPLKEPEVG
LCLFSGHHGVPPKDPRLPKAHPLTQRRVLYETVNQLRVTADGREARPLTREERDQVIHALDNKK
PTKSLSSMVLKLPALAKVLKLRDGERFTLETGVRDAIACDPLRASPAHPDRFGPRWSILDADAQ
WEVISRIRRVQSDAEHAALVDWLTEAHGLDRAHAEATAHAPLPDGYGRLGLTATTRILYQLTAD
VVTYADAVKACGWHHSDGRTGECFDRLPYYGEVLERHVIPGSYHPDDDDITRFGRITNPTVHIG
LNQLRRLVNRIIETHGKPHQIVVELARDLKKSEEQKRADIKRIRDTTEAAKKRSEKLEELEIED
NGRNRMLLRLWEDLNPDDAMRRFCPYTGTRISAAMIFDGSCDVDHILPYSRTLDDSFPNRTLCL
REANRQKRNQTPWQAWGDTPHWHAIAANLKNLPENKRWRFAPDAMTRFEGENGFLDRALKDTQY
LARISRSYLDTLFTKGGHVWVVPGRFTEMLRRHWGLNSLLSDAGRGAVKAKNRTDHRHHAIDAA
VIAATDPGLLNRISRAAGQGEAAGQSAELIARDTPPPWEGFRDDLRVRLDRIIVSHRADHGRID
HAARKQGRDSTAGQLHQETAYSIVDDIHVASRTDLLSLKPAQLLDEPGRSGQVRDPQLRKALRV
ATGGKTGKDFENALRYFASKPGPYQAIRRVRIIKPLQAQARVPVPAQDPIKAYQGGSNHLFEIW
RLPDGEIEAQVITSFEAHTLEGEKRPHPAAKRLLRVHKGDMVALERDGRRVVGHVQKMDIANGL
FIVPHNEANADTRNNDKSDPFKWIQIGARPAIASGIRRVSVDEIGRLRDGGTRPI
SEQ ID NO: 355
MLHCIAVIRVPPSEEPGFFETHADSCALCHHGCMTYAANDKAIRYRVGIDVGLRSIGFCAVEVD
DEDHPIRILNSVVHVHDAGTGGPGETESLRKRSGVAARARRRGRAEKQRLKKLDVLLEELGWGV
SSNELLDSHAPWHIRKRLVSEYIEDETERRQCLSVAMAHIARHRGWRNSFSKVDTLLLEQAPSD
RMQGLKERVEDRTGLQFSEEVTQGELVATLLEHDGDVTIRGFVRKGGKATKVHGVLEGKYMQSD
LVAELRQICRTQRVSETTFEKLVLSIFHSKEPAPSAARQRERVGLDELQLALDPAAKQPRAERA
HPAFQKFKVVATLANMRIREQSAGERSLTSEELNRVARYLLNHTESESPTWDDVARKLEVPRHR
LRGSSRASLETGGGLTYPPVDDTTVRVMSAEVDWLADWWDCANDESRGHMIDAISNGCGSEPDD
VEDEEVNELISSATAEDMLKLELLAKKLPSGRVAYSLKTLREVTAAILETGDDLSQAITRLYGV
DPGWVPTPAPIEAPVGNPSVDRVLKQVARWLKFASKRWGVPQTVNIEHTREGLKSASLLEEERE
RWERFEARREIRQKEMYKRLGISGPFRRSDQVRYEILDLQDCACLYCGNEINFQTFEVDHIIPR
VDASSDSRRTNLAAVCHSCNSAKGGLAFGQWVKRGDCPSGVSLENAIKRVRSWSKDRLGLTEKA
MGKRKSEVISRLKTEMPYEEFDGRSMESVAWMAIELKKRIEGYFNSDRPEGCAAVQVNAYSGRL
TACARRAAHVDKRVRLIRLKGDDGHHKNRFDRRNHAMDALVIALMTPAIARTIAVREDRREAQQ
LTRAFESWKNFLGSEERMQDRWESWIGDVEYACDRLNELIDADKIPVTENLRLRNSGKLHADQP
ESLKKARRGSKRPRPQRYVLGDALPADVINRVTDPGLWTALVRAPGFDSQLGLPADLNRGLKLR
GKRISADFPIDYFPTDSPALAVQGGYVGLEFHHARLYRIIGPKEKVKYALLRVCAIDLCGIDCD
DLFEVELKPSSISMRTADAKLKEAMGNGSAKQIGWLVLGDEIQIDPTKFPKQSIGKFLKECGPV
SSWRVSALDTPSKITLKPRLLSNEPLLKTSRVGGHESDLVVAECVEKIMKKTGWVVEINALCQS
GLIRVIRRNALGEVRTSPKSGLPISLNLR
SEQ ID NO: 356
MRYRVGLDLGTASVGAAVFSMDEQGNPMELIWHYERLFSEPLVPDMGQLKPKKAARRLARQQRR
QIDRRASRLRRIAIVSRRLGIAPGRNDSGVHGNDVPTLRAMAVNERIELGQLRAVLLRMGKKRG
YGGTFKAVRKVGEAGEVASGASRLEEEMVALASVQNKDSVTVGEYLAARVEHGLPSKLKVAANN
EYYAPEYALFRQYLGLPAIKGRPDCLPNMYALRHQIEHEFERIWATQSQFHDVMKDHGVKEEIR
NAIFFQRPLKSPADKVGRCSLQTNLPRAPRAQIAAQNFRIEKQMADLRWGMGRRAEMLNDHQKA
VIRELLNQQKELSFRKIYKELERAGCPGPEGKGLNMDRAALGGRDDLSGNTTLAAWRKLGLEDR
WQELDEVTQIQVINFLADLGSPEQLDTDDWSCRFMGKNGRPRNFSDEFVAFMNELRMTDGFDRL
SKMGFEGGRSSYSIKALKALTEWMIAPHWRETPETHRVDEEAAIRECYPESLATPAQGGRQSKL
EPPPLTGNEVVDVALRQVRHTINMMIDDLGSVPAQIVVEMAREMKGGVTRRNDIEKQNKRFASE
RKKAAQSIEENGKTPTPARILRYQLWIEQGHQCPYCESNISLEQALSGAYTNFEHILPRTLTQI
GRKRSELVLAHRECNDEKGNRTPYQAFGHDDRRWRIVEQRANALPKKSSRKTRLLLLKDFEGEA
LTDESIDEFADRQLHESSWLAKVTTQWLSSLGSDVYVSRGSLTAELRRRWGLDTVIPQVRFESG
MPVVDEEGAEITPEEFEKFRLQWEGHRVTREMRTDRRPDKRIDHRHHLVDAIVTALTSRSLYQQ
YAKAWKVADEKQRHGRVDVKVELPMPILTIRDIALEAVRSVRISHKPDRYPDGRFFEATAYGIA
QRLDERSGEKVDWLVSRKSLTDLAPEKKSIDVDKVRANISRIVGEAIRLHISNIFEKRVSKGMT
PQQALREPIEFQGNILRKVRCFYSKADDCVRIEHSSRRGHHYKMLLNDGFAYMEVPCKEGILYG
VPNLVRPSEAVGIKRAPESGDFIRFYKGDTVKNIKTGRVYTIKQILGDGGGKLILTPVTETKPA
DLLSAKWGRLKVGGRNIHLLRLCAE
SEQ ID NO: 357
MIGEHVRGGCLFDDHWTPNWGAFRLPNTVRTFTKAENPKDGSSLAEPRRQARGLRRRLRRKTQR
LEDLRRLLAKEGVLSLSDLETLFRETPAKDPYQLRAEGLDRPLSFPEWVRVLYHITKHRGFQSN
RRNPVEDGQERSRQEEEGKLLSGVGENERLLREGGYRTAGEMLARDPKFQDHRRNRAGDYSHTL
SRSLLLEEARRLFQSQRTLGNPHASSNLEEAFLHLVAFQNPFASGEDIRNKAGHCSLEPDQIRA
PRRSASAETFMLLQKTGNLRLIHRRTGEERPLTDKEREQIHLLAWKQEKVTHKTLRRHLEIPEE
WLFTGLPYHRSGDKAEEKLFVHLAGIHEIRKALDKGPDPAVWDTLRSRRDLLDSIADTLTFYKN
EDEILPRLESLGLSPENARALAPLSFSGTAHLSLSALGKLLPHLEEGKSYTQARADAGYAAPPP
DRHPKLPPLEEADWRNPVVFRALTQTRKVVNALVRRYGPPWCIHLETARELSQPAKVRRRIETE
QQANEKKKQQAEREFLDIVGTAPGPGDLLKMRLWREQGGFCPYCEEYLNPTRLAEPGYAEMDHI
LPYSRSLDNGWHNRVLVHGKDNRDKGNRTPFEAFGGDTARWDRLVAWVQASHLSAPKKRNLLRE
DFGEEAERELKDRNLTDTRFITKTAATLLRDRLTFHPEAPKDPVMTLNGRLTAFLRKQWGLHKN
RKNGDLHHALDAAVLAVASRSFVYRLSSHNAAWGELPRGREAENGFSLPYPAFRSEVLARLCPT
REEILLRLDQGGVGYDEAFRNGLRPVFVSRAPSRRLRGKAHMETLRSPKWKDHPEGPRTASRIP
LKDLNLEKLERMVGKDRDRKLYEALRERLAAFGGNGKKAFVAPFRKPCRSGEGPLVRSLRIFDS
GYSGVELRDGGEVYAVADHESMVRVDVYAKKNRFYLVPVYVADVARGIVKNRAIVAHKSEEEWD
LVDGSFDFRFSLFPGDLVEIEKKDGAYLGYYKSCHRGDGRLLLDRHDRMPRESDCGTFYVSTRK
DVLSMSKYQVDPLGEIRLVGSEKPPFVL
SEQ ID NO: 358
MEKKRKVTLGFDLGIASVGWAIVDSETNQVYKLGSRLFDAPDTNLERRTQRGTRRLLRRRKYRN
QKFYNLVKRTEVFGLSSREAIENRFRELSIKYPNIIELKTKALSQEVCPDEIAWILHDYLKNRG
YFYDEKETKEDFDQQTVESMPSYKLNEFYKKYGYFKGALSQPTESEMKDNKDLKEAFFFDFSNK
EWLKEINYFFNVQKNILSETFIEEFKKIFSFTRDISKGPGSDNMPSPYGIFGEFGDNGQGGRYE
HIWDKNIGKCSIFTNEQRAPKYLPSALIFNFLNELANIRLYSTDKKNIQPLWKLSSVDKLNILL
NLFNLPISEKKKKLTSTNINDIVKKESIKSIMISVEDIDMIKDEWAGKEPNVYGVGLSGLNIEE
SAKENKFKFQDLKILNVLINLLDNVGIKFEFKDRNDIIKNLELLDNLYLFLIYQKESNNKDSSI
DLFIAKNESLNIENLKLKLKEFLLGAGNEFENHNSKTHSLSKKAIDEILPKLLDNNEGWNLEAI
KNYDEEIKSQIEDNSSLMAKQDKKYLNDNFLKDAILPPNVKVTFQQAILIFNKIIQKFSKDFEI
DKVVIELAREMTQDQENDALKGIAKAQKSKKSLVEERLEANNIDKSVFNDKYEKLIYKIFLWIS
QDFKDPYTGAQISVNEIVNNKVEIDHIIPYSLCFDDSSANKVLVHKQSNQEKSNSLPYEYIKQG
HSGWNWDEFTKYVKRVFVNNVDSILSKKERLKKSENLLTASYDGYDKLGFLARNLNDTRYATIL
FRDQLNNYAEHHLIDNKKMFKVIAMNGAVTSFIRKNMSYDNKLRLKDRSDFSHHAYDAAIIALF
SNKTKTLYNLIDPSLNGIISKRSEGYWVIEDRYTGEIKELKKEDWTSIKNNVQARKIAKEIEEY
LIDLDDEVFFSRKTKRKTNRQLYNETIYGIATKTDEDGITNYYKKEKFSILDDKDIYLRLLRER
EKFVINQSNPEVIDQIIEIIESYGKENNIPSRDEAINIKYTKNKINYNLYLKQYMRSLTKSLDQ
FSEEFINQMIANKTFVLYNPTKNTTRKIKFLRLVNDVKINDIRKNQVINKFNGKNNEPKAFYEN
INSLGAIVFKNSANNFKTLSINTQIAIFGDKNWDIEDFKTYNMEKIEKYKEIYGIDKTYNFHSF
IFPGTILLDKQNKEFYYISSIQTVRDIIEIKFLNKIEFKDENKNQDTSKTPKRLMFGIKSIMNN
YEQVDISPFGINKKIFE
SEQ ID NO: 359
MGYRIGLDVGITSTGYAVLKTDKNGLPYKILTLDSVIYPRAENPQTGASLAEPRRIKRGLRRRT
RRTKFRKQRTQQLFIHSGLLSKPEIEQILATPQAKYSVYELRVAGLDRRLTNSELFRVLYFFIG
HRGFKSNRKAELNPENEADKKQMGQLLNSIEEIRKAIAEKGYRTVGELYLKDPKYNDHKRNKGY
IDGYLSTPNRQMLVDEIKQILDKQRELGNEKLTDEFYATYLLGDENRAGIFQAQRDFDEGPGAG
PYAGDQIKKMVGKDIFEPTEDRAAKATYTFQYFNLLQKMTSLNYQNTTGDTWHTLNGLDRQAII
DAVFAKAEKPTKTYKPTDFGELRKLLKLPDDARFNLVNYGSLQTQKEIETVEKKTRFVDFKAYH
DLVKVLPEEMWQSRQLLDHIGTALTLYSSDKRRRRYFAEELNLPAELIEKLLPLNFSKFGHLSI
KSMQNIIPYLEMGQVYSEATTNTGYDFRKKQISKDTIREEITNPVVRRAVTKTIKIVEQIIRRY
GKPDGINIELARELGRNFKERGDIQKRQDKNRQTNDKIAAELTELGIPVNGQNIIRYKLHKEQN
GVDPYTGDQIPFERAFSEGYEVDHIIPYSISWDDSYTNKVLTSAKCNREKGNRIPMVYLANNEQ
RLNALTNIADNIIRNSRKRQKLLKQKLSDEELKDWKQRNINDTRFITRVLYNYFRQAIEFNPEL
EKKQRVLPLNGEVTSKIRSRWGFLKVREDGDLHHAIDATVIAAITPKFIQQVTKYSQHQEVKNN
QALWHDAEIKDAEYAAEAQRMDADLFNKIFNGFPLPWPEFLDELLARISDNPVEMMKSRSWNTY
TPIEIAKLKPVFVVRLANHKISGPAHLDTIRSAKLFDEKGIVLSRVSITKLKINKKGQVATGDG
IYDPENSNNGDKVVYSAIRQALEAHNGSGELAFPDGYLEYVDHGTKKLVRKVRVAKKVSLPVRL
KNKAAADNGSMVRIDVFNTGKKFVFVPIYIKDTVEQVLPNKAIARGKSLWYQITESDQFCFSLY
PGDMVHIESKTGIKPKYSNKENNTSVVPIKNFYGYFDGADIATASILVRAHDSSYTARSIGIAG
LLKFEKYQVDYFGRYHKVHEKKRQLFVKRDE
SEQ ID NO: 360
MQKNINTKQNHIYIKQAQKIKEKLGDKPYRIGLDLGVGSIGFAIVSMEENDGNVLLPKEIIMVG
SRIFKASAGAADRKLSRGQRNNHRHTRERMRYLWKVLAEQKLALPVPADLDRKENSSEGETSAK
RFLGDVLQKDIYELRVKSLDERLSLQELGYVLYHIAGHRGSSAIRTFENDSEEAQKENTENKKI
AGNIKRLMAKKNYRTYGEYLYKEFFENKEKHKREKISNAANNHKFSPTRDLVIKEAEAILKKQA
GKDGFHKELTEEYIEKLTKAIGYESEKLIPESGFCPYLKDEKRLPASHKLNEERRLWETLNNAR
YSDPIVDIVTGEITGYYEKQFTKEQKQKLFDYLLTGSELTPAQTKKLLGLKNTNFEDIILQGRD
KKAQKIKGYKLIKLESMPFWARLSEAQQDSFLYDWNSCPDEKLLTEKLSNEYHLTEEEIDNAFN
EIVLSSSYAPLGKSAMLIILEKIKNDLSYTEAVEEALKEGKLTKEKQAIKDRLPYYGAVLQEST
QKIIAKGFSPQFKDKGYKTPHTNKYELEYGRIANPVVHQTLNELRKLVNEIIDILGKKPCEIGL
ETARELKKSAEDRSKLSREQNDNESNRNRIYEIYIRPQQQVIITRRENPRNYILKFELLEEQKS
QCPFCGGQISPNDIINNQADIEHLFPIAESEDNGRNNLVISHSACNADKAKRSPWAAFASAAKD
SKYDYNRILSNVKENIPHKAWRFNQGAFEKFIENKPMAARFKTDNSYISKVAHKYLACLFEKPN
IICVKGSLTAQLRMAWGLQGLMIPFAKQLITEKESESFNKDVNSNKKIRLDNRHHALDAIVIAY
ASRGYGNLLNKMAGKDYKINYSERNWLSKILLPPNNIVWENIDADLESFESSVKTALKNAFISV
KHDHSDNGELVKGTMYKIFYSERGYTLTTYKKLSALKLTDPQKKKTPKDFLETALLKFKGRESE
MKNEKIKSAIENNKRLFDVIQDNLEKAKKLLEEENEKSKAEGKKEKNINDASIYQKAISLSGDK
YVQLSKKEPGKFFAISKPTPTTTGYGYDTGDSLCVDLYYDNKGKLCGEIIRKIDAQQKNPLKYK
EQGFTLFERIYGGDILEVDFDIHSDKNSFRNNTGSAPENRVFIKVGTFTEITNNNIQIWFGNII
KSTGGQDDSFTINSMQQYNPRKLILSSCGFIKYRSPILKNKEG
SEQ ID NO: 361
MAAFKPNPINYILGLDIGIASVGWAMVEIDEDENPICLIDLGVRVFERAEVPKTGDSLAMARRL
ARSVRRLTRRRAHRLLRARRLLKREGVLQAADFDENGLIKSLPNTPWQLRAAALDRKLTPLEWS
AVLLHLIKHRGYLSQRKNEGETADKELGALLKGVADNAHALQTGDFRTPAELALNKFEKESGHI
RNQRGDYSHTFSRKDLQAELILLFEKQKEFGNPHVSGGLKEGIETLLMTQRPALSGDAVQKMLG
HCTFEPAEPKAAKNTYTAERFIWLTKLNNLRILEQGSERPLTDTERATLMDEPYRKSKLTYAQA
RKLLGLEDTAFFKGLRYGKDNAEASTLMEMKAYHAISRALEKEGLKDKKSPLNLSPELQDEIGT
AFSLFKTDEDITGRLKDRIQPEILEALLKHISFDKFVQISLKALRRIVPLMEQGKRYDEACAEI
YGDHYGKKNTEEKIYLPPIPADEIRNPVVLRALSQARKVINGVVRRYGSPARIHIETAREVGKS
FKDRKEIEKRQEENRKDREKAAAKFREYFPNFVGEPKSKDILKLRLYEQQHGKCLYSGKEINLG
RLNEKGYVEIDHALPFSRTWDDSFNNKVLVLGSENQNKGNQTPYEYFNGKDNSREWQEFKARVE
TSRFPRSKKQRILLQKFDEDGFKERNLNDTRYVNRFLCQFVADRMRLTGKGKKRVFASNGQITN
LLRGFWGLRKVRAENDRHHALDAVVVACSTVAMQQKITRFVRYKEMNAFDGKTIDKETGEVLHQ
KTHFPQPWEFFAQEVMIRVFGKPDGKPEFEEADTPEKLRTLLAEKLSSRPEAVHEYVTPLFVSR
APNRKMSGQGHMETVKSAKRLDEGVSVLRVPLTQLKLKDLEKMVNREREPKLYEALKARLEAHK
DDPAKAFAEPFYKYDKAGNRTQQVKAVRVEQVQKTGVWVRNHNGIADNATMVRVDVFEKGDKYY
LVPIYSWQVAKGILPDRAVVQGKDEEDWQLIDDSFNFKFSLHPNDLVEVITKKARMFGYFASCH
RGTGNINIRIHDLDHKIGKNGILEGIGVKTALSFQKYQIDELGKEIRPCRLKKRPPVR
SEQ ID NO: 362
MQTTNLSYILGLDLGIASVGWAVVEINENEDPIGLIDVGVRIFERAEVPKTGESLALSRRLARS
TRRLIRRRAHRLLLAKRFLKREGILSTIDLEKGLPNQAWELRVAGLERRLSAIEWGAVLLHLIK
HRGYLSKRKNESQTNNKELGALLSGVAQNHQLLQSDDYRTPAELALKKFAKEEGHIRNQRGAYT
HTFNRLDLLAELNLLFAQQHQFGNPHCKEHIQQYMTELLMWQKPALSGEAILKMLGKCTHEKNE
FKAAKHTYSAERFVWLTKLNNLRILEDGAERALNEEERQLLINHPYEKSKLTYAQVRKLLGLSE
QAIFKHLRYSKENAESATFMELKAWHAIRKALENQGLKDTWQDLAKKPDLLDEIGTAFSLYKTD
EDIQQYLTNKVPNSVINALLVSLNFDKFIELSLKSLRKILPLMEQGKRYDQACREIYGHHYGEA
NQKTSQLLPAIPAQEIRNPVVLRTLSQARKVINAIIRQYGSPARVHIETGRELGKSFKERREIQ
KQQEDNRTKRESAVQKFKELFSDFSSEPKSKDILKFRLYEQQHGKCLYSGKEINIHRLNEKGYV
EIDHALPFSRTWDDSFNNKVLVLASENQNKGNQTPYEWLQGKINSERWKNFVALVLGSQCSAAK
KQRLLTQVIDDNKFIDRNLNDTRYIARFLSNYIQENLLLVGKNKKNVFTPNGQITALLRSRWGL
IKARENNNRHHALDAIVVACATPSMQQKITRFIRFKEVHPYKIENRYEMVDQESGEIISPHFPE
PWAYFRQEVNIRVFDNHPDTVLKEMLPDRPQANHQFVQPLFVSRAPTRKMSGQGHMETIKSAKR
LAEGISVLRIPLTQLKPNLLENMVNKEREPALYAGLKARLAEFNQDPAKAFATPFYKQGGQQVK
AIRVEQVQKSGVLVRENNGVADNASIVRTDVFIKNNKFFLVPIYTWQVAKGILPNKAIVAHKNE
DEWEEMDEGAKFKFSLFPNDLVELKTKKEYFFGYYIGLDRATGNISLKEHDGEISKGKDGVYRV
GVKLALSFEKYQVDELGKNRQICRPQQRQPVR
SEQ ID NO: 363
MGIRFAFDLGTNSIGWAVWRTGPGVFGEDTAASLDGSGVLIFKDGRNPKDGQSLATMRRVPRQS
RKRRDRFVLRRRDLLAALRKAGLFPVDVEEGRRLAATDPYHLRAKALDESLTPHEMGRVIFHLN
QRRGFRSNRKADRQDREKGKIAEGSKRLAETLAATNCRTLGEFLWSRHRGTPRTRSPTRIRMEG
EGAKALYAFYPTREMVRAEFERLWTAQSRFAPDLLTPERHEEIAGILFRQRDLAPPKIGCCTFE
PSERRLPRALPSVEARGIYERLAHLRITTGPVSDRGLTRPERDVLASALLAGKSLTFKAVRKTL
KILPHALVNFEEAGEKGLDGALTAKLLSKPDHYGAAWHGLSFAEKDTFVGKLLDEADEERLIRR
LVTENRLSEDAARRCASIPLADGYGRLGRTANTEILAALVEETDETGTVVTYAEAVRRAGERTG
RNWHHSDERDGVILDRLPYYGEILQRHVVPGSGEPEEKNEAARWGRLANPTVHIGLNQLRKVVN
RLIAAHGRPDQIVVELARELKLNREQKERLDRENRKNREENERRTAILAEHGQRDTAENKIRLR
LFEEQARANAGIALCPYTGRAIGIAELFTSEVEIDHILPVSLTLDDSLANRVLCRREANREKRR
QTPFQAFGATPAWNDIVARAAKLPPNKRWRFDPAALERFEREGGFLGRQLNETKYLSRLAKIYL
GKICDPDRVYVTPGTLTGLLRARWGLNSILSDSNFKNRSDHRHHAVDAVVIGVLTRGMIQRIAH
DAARAEDQDLDRVFRDVPVPFEDFRDHVRERVSTITVAVKPEHGKGGALHEDTSYGLVPDTDPN
AALGNLVVRKPIRSLTAGEVDRVRDRALRARLGALAAPFRDESGRVRDAKGLAQALEAFGAENG
IRRVRILKPDASVVTIADRRTGVPYRAVAPGENHHVDIVQMRDGSWRGFAASVFEVNRPGWRPE
WEVKKLGGKLVMRLHKGDMVELSDKDGQRRVKVVQQIEISANRVRLSPHNDGGKLQDRHADADD
PFRWDLATIPLLKDRGCVAVRVDPIGVVTLRRSNV
SEQ ID NO: 364
MMEVFMGRLVLGLDIGITSVGFGIIDLDESEIVDYGVRLFKEGTAAENETRRTKRGGRRLKRRR
VTRREDMLHLLKQAGIISTSFHPLNNPYDVRVKGLNERLNGEELATALLHLCKHRGSSVETIED
DEAKAKEAGETKKVLSMNDQLLKSGKYVCEIQKERLRTNGHIRGHENNFKTRAYVDEAFQILSH
QDLSNELKSAIITIISRKRMYYDGPGGPLSPTPYGRYTYFGQKEPIDLIEKMRGKCSLFPNEPR
APKLAYSAELFNLLNDLNNLSIEGEKLTSEQKAMILKIVHEKGKITPKQLAKEVGVSLEQIRGF
RIDTKGSPLLSELTGYKMIREVLEKSNDEHLEDHVFYDEIAEILTKTKDIEGRKKQISELSSDL
NEESVHQLAGLTKFTAYHSLSFKALRLINEEMLKTELNQMQSITLFGLKQNNELSVKGMKNIQA
DDTAILSPVAKRAQRETFKVVNRLREIYGEFDSIVVEMAREKNSEEQRKAIRERQKFFEMRNKQ
VADIIGDDRKINAKLREKLVLYQEQDGKTAYSLEPIDLKLLIDDPNAYEVDHIIPISISLDDSI
TNKVLVTHRENQEKGNLTPISAFVKGRFTKGSLAQYKAYCLKLKEKNIKTNKGYRKKVEQYLLN
ENDIYKYDIQKEFINRNLVDTSYASRVVLNTLTTYFKQNEIPTKVFTVKGSLTNAFRRKINLKK
DRDEDYGHHAIDALIIASMPKMRLLSTIFSRYKIEDIYDESTGEVFSSGDDSMYYDDRYFAFIA
SLKAIKVRKFSHKIDTKPNRSVADETIYSTRVIDGKEKVVKKYKDIYDPKFTALAEDILNNAYQ
EKYLMALHDPQTFDQIVKVVNYYFEEMSKSEKYFTKDKKGRIKISGMNPLSLYRDEHGMLKKYS
KKGDGPAITQMKYFDGVLGNHIDISAHYQVRDKKVVLQQISPYRTDFYYSKENGYKFVTIRYKD
VRWSEKKKKYVIDQQDYAMKKAEKKIDDTYEFQFSMHRDELIGITKAEGEALIYPDETWHNFNF
FFHAGETPEILKFTATNNDKSNKIEVKPIHCYCKMRLMPTISKKIVRIDKYATDVVGNLYKVKK
NTLKFEFD
SEQ ID NO: 365
MKKILGVDLGITSFGYAILQETGKDLYRCLDNSVVMRNNPYDEKSGESSQSIRSTQKSMRRLIE
KRKKRIRCVAQTMERYGILDYSETMKINDPKNNPIKNRWQLRAVDAWKRPLSPQELFAIFAHMA
KHRGYKSIATEDLIYELELELGLNDPEKESEKKADERRQVYNALRHLEELRKKYGGETIAQTIH
RAVEAGDLRSYRNHDDYEKMIRREDIEEEIEKVLLRQAELGALGLPEEQVSELIDELKACITDQ
EMPTIDESLFGKCTFYKDELAAPAYSYLYDLYRLYKKLADLNIDGYEVTQEDREKVIEWVEKKI
AQGKNLKKITHKDLRKILGLAPEQKIFGVEDERIVKGKKEPRTFVPFFFLADIAKFKELFASIQ
KHPDALQIFRELAEILQRSKTPQEALDRLRALMAGKGIDTDDRELLELFKNKRSGTRELSHRYI
LEALPLFLEGYDEKEVQRILGFDDREDYSRYPKSLRHLHLREGNLFEKEENPINNHAVKSLASW
ALGLIADLSWRYGPFDEIILETTRDALPEKIRKEIDKAMREREKALDKIIGKYKKEFPSIDKRL
ARKIQLWERQKGLDLYSGKVINLSQLLDGSADIEHIVPQSLGGLSTDYNTIVTLKSVNAAKGNR
LPGDWLAGNPDYRERIGMLSEKGLIDWKKRKNLLAQSLDEIYTENTHSKGIRATSYLEALVAQV
LKRYYPFPDPELRKNGIGVRMIPGKVTSKTRSLLGIKSKSRETNFHHAEDALILSTLTRGWQNR
LHRMLRDNYGKSEAELKELWKKYMPHIEGLTLADYIDEAFRRFMSKGEESLFYRDMFDTIRSIS
YWVDKKPLSASSHKETVYSSRHEVPTLRKNILEAFDSLNVIKDRHKLTTEEFMKRYDKEIRQKL
WLHRIGNTNDESYRAVEERATQIAQILTRYQLMDAQNDKEIDEKFQQALKELITSPIEVTGKLL
RKMRFVYDKLNAMQIDRGLVETDKNMLGIHISKGPNEKLIFRRMDVNNAHELQKERSGILCYLN
EMLFIFNKKGLIHYGCLRSYLEKGQGSKYIALFNPRFPANPKAQPSKFTSDSKIKQVGIGSATG
IIKAHLDLDGHVRSYEVFGTLPEGSIEWFKEESGYGRVEDDPHH
SEQ ID NO: 366
MRPIEPWILGLDIGTDSLGWAVFSCEEKGPPTAKELLGGGVRLFDSGRDAKDHTSRQAERGAFR
RARRQTRTWPWRRDRLIALFQAAGLTPPAAETRQIALALRREAVSRPLAPDALWAALLHLAHHR
GFRSNRIDKRERAAAKALAKAKPAKATAKATAPAKEADDEAGFWEGAEAALRQRMAASGAPTVG
ALLADDLDRGQPVRMRYNQSDRDGVVAPTRALIAEELAEIVARQSSAYPGLDWPAVTRLVLDQR
PLRSKGAGPCAFLPGEDRALRALPTVQDFIIRQTLANLRLPSTSADEPRPLTDEEHAKALALLS
TARFVEWPALRRALGLKRGVKFTAETERNGAKQAARGTAGNLTEAILAPLIPGWSGWDLDRKDR
VFSDLWAARQDRSALLALIGDPRGPTRVTEDETAEAVADAIQIVLPTGRASLSAKAARAIAQAM
APGIGYDEAVTLALGLHHSHRPRQERLARLPYYAAALPDVGLDGDPVGPPPAEDDGAAAEAYYG
RIGNISVHIALNETRKIVNALLHRHGPILRLVMVETTRELKAGADERKRMIAEQAERERENAEI
DVELRKSDRWMANARERRQRVRLARRQNNLCPYTSTPIGHADLLGDAYDIDHVIPLARGGRDSL
DNMVLCQSDANKTKGDKTPWEAFHDKPGWIAQRDDFLARLDPQTAKALAWRFADDAGERVARKS
AEDEDQGFLPRQLTDTGYIARVALRYLSLVTNEPNAVVATNGRLTGLLRLAWDITPGPAPRDLL
PTPRDALRDDTAARRFLDGLTPPPLAKAVEGAVQARLAALGRSRVADAGLADALGLTLASLGGG
GKNRADHRHHFIDAAMIAVTTRGLINQINQASGAGRILDLRKWPRTNFEPPYPTFRAEVMKQWD
HIHPSIRPAHRDGGSLHAATVFGVRNRPDARVLVQRKPVEKLFLDANAKPLPADKIAEIIDGFA
SPRMAKRFKALLARYQAAHPEVPPALAALAVARDPAFGPRGMTANTVIAGRSDGDGEDAGLITP
FRANPKAAVRTMGNAVYEVWEIQVKGRPRWTHRVLTRFDRTQPAPPPPPENARLVMRLRRGDLV
YWPLESGDRLFLVKKMAVDGRLALWPARLATGKATALYAQLSCPNINLNGDQGYCVQSAEGIRK
EKIRTTSCTALGRLRLSKKAT
SEQ ID NO: 367
MKYTLGLDVGIASVGWAVIDKDNNKIIDLGVRCFDKAEESKTGESLATARRIARGMRRRISRRS
QRLRLVKKLFVQYEIIKDSSEFNRIFDTSRDGWKDPWELRYNALSRILKPYELVQVLTHITKRR
GFKSNRKEDLSTTKEGVVITSIKNNSEMLRTKNYRTIGEMIFMETPENSNKRNKVDEYIHTIAR
EDLLNEIKYIFSIQRKLGSPFVTEKLEHDFLNIWEFQRPFASGDSILSKVGKCTLLKEELRAPT
SCYTSEYFGLLQSINNLVLVEDNNTLTLNNDQRAKIIEYAHFKNEIKYSEIRKLLDIEPEILFK
AHNLTHKNPSGNNESKKFYEMKSYHKLKSTLPTDIWGKLHSNKESLDNLFYCLTVYKNDNEIKD
YLQANNLDYLIEYIAKLPTFNKFKHLSLVAMKRIIPFMEKGYKYSDACNMAELDFTGSSKLEKC
NKLTVEPIIENVTNPVVIRALTQARKVINAIIQKYGLPYMVNIELAREAGMTRQDRDNLKKEHE
NNRKAREKISDLIRQNGRVASGLDILKWRLWEDQGGRCAYSGKPIPVCDLLNDSLTQIDHIYPY
SRSMDDSYMNKVLVLTDENQNKRSYTPYEVWGSTEKWEDFEARIYSMHLPQSKEKRLLNRNFIT
KDLDSFISRNLNDTRYISRFLKNYIESYLQFSNDSPKSCVVCVNGQCTAQLRSRWGLNKNREES
DLHHALDAAVIACADRKIIKEITNYYNERENHNYKVKYPLPWHSFRQDLMETLAGVFISRAPRR
KITGPAHDETIRSPKHFNKGLTSVKIPLTTVTLEKLETMVKNTKGGISDKAVYNVLKNRLIEHN
NKPLKAFAEKIYKPLKNGTNGAIIRSIRVETPSYTGVFRNEGKGISDNSLMVRVDVFKKKDKYY
LVPIYVAHMIKKELPSKAIVPLKPESQWELIDSTHEFLFSLYQNDYLVIKTKKGITEGYYRSCH
RGTGSLSLMPHFANNKNVKIDIGVRTAISIEKYNVDILGNKSIVKGEPRRGMEKYNSFKSN
SEQ ID NO: 368
MIRTLGIDIGIASIGWAVIEGEYTDKGLENKEIVASGVRVFTKAENPKNKESLALPRTLARSAR
RRNARKKGRIQQVKHYLSKALGLDLECFVQGEKLATLFQTSKDFLSPWELRERALYRVLDKEEL
ARVILHIAKRRGYDDITYGVEDNDSGKIKKAIAENSKRIKEEQCKTIGEMMYKLYFQKSLNVRN
KKESYNRCVGRSELREELKTIFQIQQELKSPWVNEELIYKLLGNPDAQSKQEREGLIFYQRPLK
GFGDKIGKCSHIKKGENSPYRACKHAPSAEEFVALTKSINFLKNLTNRHGLCFSQEDMCVYLGK
ILQEAQKNEKGLTYSKLKLLLDLPSDFEFLGLDYSGKNPEKAVFLSLPSTFKLNKITQDRKTQD
KIANILGANKDWEAILKELESLQLSKEQIQTIKDAKLNFSKHINLSLEALYHLLPLMREGKRYD
EGVEILQERGIFSKPQPKNRQLLPPLSELAKEESYFDIPNPVLRRALSEFRKVVNALLEKYGGF
HYFHIELTRDVCKAKSARMQLEKINKKNKSENDAASQLLEVLGLPNTYNNRLKCKLWKQQEEYC
LYSGEKITIDHLKDQRALQIDHAFPLSRSLDDSQSNKVLCLTSSNQEKSNKTPYEWLGSDEKKW
DMYVGRVYSSNFSPSKKRKLTQKNFKERNEEDFLARNLVDTGYIGRVTKEYIKHSLSFLPLPDG
KKEHIRIISGSMTSTMRSFWGVQEKNRDHHLHHAQDAIIIACIEPSMIQKYTTYLKDKETHRLK
SHQKAQILREGDHKLSLRWPMSNFKDKIQESIQNIIPSHHVSHKVTGELHQETVRTKEFYYQAF
GGEEGVKKALKFGKIREINQGIVDNGAMVRVDIFKSKDKGKFYAVPIYTYDFAIGKLPNKAIVQ
GKKNGIIKDWLEMDENYEFCFSLFKNDCIKIQTKEMQEAVLAIYKSTNSAKATIELEHLSKYAL
KNEDEEKMFTDTDKEKNKTMTRESCGIQGLKVFQKVKLSVLGEVLEHKPRNRQNIALKTTPKHV
SEQ ID NO: 369
MKYSIGLDIGIASVGWSVINKDKERIEDMGVRIFQKAENPKDGSSLASSRREKRGSRRRNRRKK
HRLDRIKNILCESGLVKKNEIEKIYKNAYLKSPWELRAKSLEAKISNKEIAQILLHIAKRRGFK
SFRKTDRNADDTGKLLSGIQENKKIMEEKGYLTIGDMVAKDPKFNTHVRNKAGSYLFSFSRKLL
EDEVRKIQAKQKELGNTHFTDDVLEKYIEVFNSQRNFDEGPSKPSPYYSEIGQIAKMIGNCTFE
SSEKRTAKNTWSGERFVFLQKLNNFRIVGLSGKRPLTEEERDIVEKEVYLKKEVRYEKLRKILY
LKEEERFGDLNYSKDEKQDKKTEKTKFISLIGNYTIKKLNLSEKLKSEIEEDKSKLDKIIEILT
FNKSDKTIESNLKKLELSREDIEILLSEEFSGTLNLSLKAIKKILPYLEKGLSYNEACEKADYD
YKNNGIKFKRGELLPVVDKDLIANPVVLRAISQTRKVVNAIIRKYGTPHTIHVEVARDLAKSYD
DRQTIIKENKKRELENEKTKKFISEEFGIKNVKGKLLLKYRLYQEQEGRCAYSRKELSLSEVIL
DESMTDIDHIIPYSRSMDDSYSNKVLVLSGENRKKSNLLPKEYFDRQGRDWDTFVLNVKAMKIH
PRKKSNLLKEKFTREDNKDWKSRALNDTRYISRFVANYLENALEYRDDSPKKRVFMIPGQLTAQ
LRARWRLNKVRENGDLHHALDAAVVAVTDQKAINNISNISRYKELKNCKDVIPSIEYHADEETG
EVYFEEVKDTRFPMPWSGFDLELQKRLESENPREEFYNLLSDKRYLGWFNYEEGFIEKLRPVFV
SRMPNRGVKGQAHQETIRSSKKISNQIAVSKKPLNSIKLKDLEKMQGRDTDRKLYEALKNRLEE
YDDKPEKAFAEPFYKPTNSGKRGPLVRGIKVEEKQNVGVYVNGGQASNGSMVRIDVFRKNGKFY
TVPIYVHQTLLKELPNRAINGKPYKDWDLIDGSFEFLYSFYPNDLIEIEFGKSKSIKNDNKLTK
TEIPEVNLSEVLGYYRGMDTSTGAATIDTQDGKIQMRIGIKTVKNIKKYQVDVLGNVYKVKREK
RQTF
SEQ ID NO: 370
MSKKVSRRYEEQAQEICQRLGSRPYSIGLDLGVGSIGVAVAAYDPIKKQPSDLVFVSSRIFIPS
TGAAERRQKRGQRNSLRHRANRLKFLWKLLAERNLMLSYSEQDVPDPARLRFEDAVVRANPYEL
RLKGLNEQLTLSELGYALYHIANHRGSSSVRTFLDEEKSSDDKKLEEQQAMTEQLAKEKGISTF
IEVLTAFNTNGLIGYRNSESVKSKGVPVPTRDIISNEIDVLLQTQKQFYQEILSDEYCDRIVSA
ILFENEKIVPEAGCCPYFPDEKKLPRCHFLNEERRLWEAINNARIKMPMQEGAAKRYQSASFSD
EQRHILFHIARSGTDITPKLVQKEFPALKTSIIVLQGKEKAIQKIAGFRFRRLEEKSFWKRLSE
EQKDDFFSAWTNTPDDKRLSKYLMKHLLLTENEVVDALKTVSLIGDYGPIGKTATQLLMKHLED
GLTYTEALERGMETGEFQELSVWEQQSLLPYYGQILTGSTQALMGKYWHSAFKEKRDSEGFFKP
NTNSDEEKYGRIANPVVHQTLNELRKLMNELITILGAKPQEITVELARELKVGAEKREDIIKQQ
TKQEKEAVLAYSKYCEPNNLDKRYIERFRLLEDQAFVCPYCLEHISVADIAAGRADVDHIFPRD
DTADNSYGNKVVAHRQCNDIKGKRTPYAAFSNTSAWGPIMHYLDETPGMWRKRRKFETNEEEYA
KYLQSKGFVSRFESDNSYIAKAAKEYLRCLFNPNNVTAVGSLKGMETSILRKAWNLQGIDDLLG
SRHWSKDADTSPTMRKNRDDNRHHGLDAIVALYCSRSLVQMINTMSEQGKRAVEIEAMIPIPGY
ASEPNLSFEAQRELFRKKILEFMDLHAFVSMKTDNDANGALLKDTVYSILGADTQGEDLVFVVK
KKIKDIGVKIGDYEEVASAIRGRITDKQPKWYPMEMKDKIEQLQSKNEAALQKYKESLVQAAAV
LEESNRKLIESGKKPIQLSEKTISKKALELVGGYYYLISNNKRTKTFVVKEPSNEVKGFAFDTG
SNLCLDFYHDAQGKLCGEIIRKIQAMNPSYKPAYMKQGYSLYVRLYQGDVCELRASDLTEAESN
LAKTTHVRLPNAKPGRTFVIIITFTEMGSGYQIYFSNLAKSKKGQDTSFTLTTIKNYDVRKVQL
SSAGLVRYVSPLLVDKIEKDEVALCGE
SEQ ID NO: 371
MNQKFILGLDIGITSVGYGLIDYETKNIIDAGVRLFPEANVENNEGRRSKRGSRRLKRRRIHRL
ERVKKLLEDYNLLDQSQIPQSTNPYAIRVKGLSEALSKDELVIALLHIAKRRGIHKIDVIDSND
DVGNELSTKEQLNKNSKLLKDKFVCQIQLERMNEGQVRGEKNRFKTADIIKEIIQLLNVQKNFH
QLDENFINKYIELVEMRREYFEGPGKGSPYGWEGDPKAWYETLMGHCTYFPDELRSVKYAYSAD
LFNALNDLNNLVIQRDGLSKLEYHEKYHIIENVFKQKKKPTLKQIANEINVNPEDIKGYRITKS
GKPQFTEFKLYHDLKSVLFDQSILENEDVLDQIAEILTIYQDKDSIKSKLTELDILLNEEDKEN
IAQLTGYTGTHRLSLKCIRLVLEEQWYSSRNQMEIFTHLNIKPKKINLTAANKIPKAMIDEFIL
SPVVKRTFGQAINLINKIIEKYGVPEDIIIELARENNSKDKQKFINEMQKKNENTRKRINEIIG
KYGNQNAKRLVEKIRLHDEQEGKCLYSLESIPLEDLLNNPNHYEVDHIIPRSVSFDNSYHNKVL
VKQSENSKKSNLTPYQYFNSGKSKLSYNQFKQHILNLSKSQDRISKKKKEYLLEERDINKFEVQ
KEFINRNLVDTRYATRELTNYLKAYFSANNMNVKVKTINGSFTDYLRKVWKFKKERNHGYKHHA
EDALIIANADFLFKENKKLKAVNSVLEKPEIESKQLDIQVDSEDNYSEMFIIPKQVQDIKDFRN
FKYSHRVDKKPNRQLINDTLYSTRKKDNSTYIVQTIKDIYAKDNTTLKKQFDKSPEKFLMYQHD
PRTFEKLEVIMKQYANEKNPLAKYHEETGEYLTKYSKKNNGPIVKSLKYIGNKLGSHLDVTHQF
KSSTKKLVKLSIKPYRFDVYLTDKGYKFITISYLDVLKKDNYYYIPEQKYDKLKLGKAIDKNAK
FIASFYKNDLIKLDGEIYKIIGVNSDTRNMIELDLPDIRYKEYCELNNIKGEPRIKKTIGKKVN
SIEKLTTDVLGNVFTNTQYTKPQLLFKRGN
SEQ ID NO: 372
MIMKLEKWRLGLDLGTNSIGWSVFSLDKDNSVQDLIDMGVRIFSDGRDPKTKEPLAVARRTARS
QRKLIYRRKLRRKQVFKFLQEQGLFPKTKEECMTLKSLNPYELRIKALDEKLEPYELGRALFNL
AVRRGFKSNRKDGSREEVSEKKSPDEIKTQADMQTHLEKAIKENGCRTITEFLYKNQGENGGIR
FAPGRMTYYPTRKMYEEEFNLIRSKQEKYYPQVDWDDIYKAIFYQRPLKPQQRGYCIYENDKER
TFKAMPCSQKLRILQDIGNLAYYEGGSKKRVELNDNQDKVLYELLNSKDKVTFDQMRKALCLAD
SNSFNLEENRDFLIGNPTAVKMRSKNRFGKLWDEIPLEEQDLIIETIITADEDDAVYEVIKKYD
LTQEQRDFIVKNTILQSGTSMLCKEVSEKLVKRLEEIADLKYHEAVESLGYKFADQTVEKYDLL
PYYGKVLPGSTMEIDLSAPETNPEKHYGKISNPTVHVALNQTRVVVNALIKEYGKPSQIAIELS
RDLKNNVEKKAEIARKQNQRAKENIAINDTISALYHTAFPGKSFYPNRNDRMKYRLWSELGLGN
KCIYCGKGISGAELFTKEIEIEHILPFSRTLLDAESNLTVAHSSCNAFKAERSPFEAFGTNPSG
YSWQEIIQRANQLKNTSKKNKFSPNAMDSFEKDSSFIARQLSDNQYIAKAALRYLKCLVENPSD
VWTTNGSMTKLLRDKWEMDSILCRKFTEKEVALLGLKPEQIGNYKKNRFDHRHHAIDAVVIGLT
DRSMVQKLATKNSHKGNRIEIPEFPILRSDLIEKVKNIVVSFKPDHGAEGKLSKETLLGKIKLH
GKETFVCRENIVSLSEKNLDDIVDEIKSKVKDYVAKHKGQKIEAVLSDFSKENGIKKVRCVNRV
QTPIEITSGKISRYLSPEDYFAAVIWEIPGEKKTFKAQYIRRNEVEKNSKGLNVVKPAVLENGK
PHPAAKQVCLLHKDDYLEFSDKGKMYFCRIAGYAATNNKLDIRPVYAVSYCADWINSTNETMLT
GYWKPTPTQNWVSVNVLFDKQKARLVTVSPIGRVFRK
SEQ ID NO: 373
MSSKAIDSLEQLDLFKPQEYTLGLDLGIKSIGWAILSGERIANAGVYLFETAEELNSTGNKLIS
KAAERGRKRRIRRMLDRKARRGRHIRYLLEREGLPTDELEEVVVHQSNRTLWDVRAEAVERKLT
KQELAAVLFHLVRHRGYFPNTKKLPPDDESDSADEEQGKINRATSRLREELKASDCKTIGQFLA
QNRDRQRNREGDYSNLMARKLVFEEALQILAFQRKQGHELSKDFEKTYLDVLMGQRSGRSPKLG
NCSLIPSELRAPSSAPSTEWFKFLQNLGNLQISNAYREEWSIDAPRRAQIIDACSQRSTSSYWQ
IRRDFQIPDEYRFNLVNYERRDPDVDLQEYLQQQERKTLANFRNWKQLEKIIGTGHPIQTLDEA
ARLITLIKDDEKLSDQLADLLPEASDKAITQLCELDFTTAAKISLEAMYRILPHMNQGMGFFDA
CQQESLPEIGVPPAGDRVPPFDEMYNPVVNRVLSQSRKLINAVIDEYGMPAKIRVELARDLGKG
RELRERIKLDQLDKSKQNDQRAEDFRAEFQQAPRGDQSLRYRLWKEQNCTCPYSGRMIPVNSVL
SEDTQIDHILPISQSFDNSLSNKVLCFTEENAQKSNRTPFEYLDAADFQRLEAISGNWPEAKRN
KLLHKSFGKVAEEWKSRALNDTRYLTSALADHLRHHLPDSKIQTVNGRITGYLRKQWGLEKDRD
KHTHHAVDAIVVACTTPAIVQQVTLYHQDIRRYKKLGEKRPTPWPETFRQDVLDVEEEIFITRQ
PKKVSGGIQTKDTLRKHRSKPDRQRVALTKVKLADLERLVEKDASNRNLYEHLKQCLEESGDQP
TKAFKAPFYMPSGPEAKQRPILSKVTLLREKPEPPKQLTELSGGRRYDSMAQGRLDIYRYKPGG
KRKDEYRVVLQRMIDLMRGEENVHVFQKGVPYDQGPEIEQNYTFLFSLYFDDLVEFQRSADSEV
IRGYYRTFNIANGQLKISTYLEGRQDFDFFGANRLAHFAKVQVNLLGKVIK
SEQ ID NO: 374
MRSLRYRLALDLGSTSLGWALFRLDACNRPTAVIKAGVRIFSDGRNPKDGSSLAVTRRAARAMR
RRRDRLLKRKTRMQAKLVEHGFFPADAGKRKALEQLNPYALRAKGLQEALLPGEFARALFHINQ
RRGFKSNRKTDKKDNDSGVLKKAIGQLRQQMAEQGSRTVGEYLWTRLQQGQGVRARYREKPYTT
EEGKKRIDKSYDLYIDRAMIEQEFDALWAAQAAFNPTLFHEAARADLKDTLLHQRPLRPVKPGR
CTLLPEEERAPLALPSTQRFRIHQEVNHLRLLDENLREVALTLAQRDAVVTALETKAKLSFEQI
RKLLKLSGSVQFNLEDAKRTELKGNATSAALARKELFGAAWSGFDEALQDEIVWQLVTEEGEGA
LIAWLQTHTGVDEARAQAIVDVSLPEGYGNLSRKALARIVPALRAAVITYDKAVQAAGFDHHSQ
LGFEYDASEVEDLVHPETGEIRSVFKQLPYYGKALQRHVAFGSGKPEDPDEKRYGKIANPTVHI
GLNQVRMVVNALIRRYGRPTEVVIELARDLKQSREQKVEAQRRQADNQRRNARIRRSIAEVLGI
GEERVRGSDIQKWICWEELSFDAADRRCPYSGVQISAAMLLSDEVEVEHILPFSKTLDDSLNNR
TVAMRQANRIKRNRTPWDARAEFEAQGWSYEDILQRAERMPLRKRYRFAPDGYERWLGDDKDFL
ARALNDTRYLSRVAAEYLRLVCPGTRVIPGQLTALLRGKFGLNDVLGLDGEKNRNDHRHHAVDA
CVIGVTDQGLMQRFATASAQARGDGLTRLVDGMPMPWPTYRDHVERAVRHIWVSHRPDHGFEGA
MMEETSYGIRKDGSIKQRRKADGSAGREISNLIRIHEATQPLRHGVSADGQPLAYKGYVGGSNY
CIEITVNDKGKWEGEVISTFRAYGVVRAGGMGRLRNPHEGQNGRKLIMRLVIGDSVRLEVDGAE
RTMRIVKISGSNGQIFMAPIHEANVDARNTDKQDAFTYTSKYAGSLQKAKTRRVTISPIGEVRD
PGFKG
SEQ ID NO: 375
MARPAFRAPRREHVNGWTPDPHRISKPFFILVSWHLLSRVVIDSSSGCFPGTSRDHTDKFAEWE
CAVQPYRLSFDLGTNSIGWGLLNLDRQGKPREIRALGSRIFSDGRDPQDKASLAVARRLARQMR
RRRDRYLTRRTRLMGALVRFGLMPADPAARKRLEVAVDPYLARERATRERLEPFEIGRALFHLN
QRRGYKPVRTATKPDEEAGKVKEAVERLEAAIAAAGAPTLGAWFAWRKTRGETLRARLAGKGKE
AAYPFYPARRMLEAEFDTLWAEQARHHPDLLTAEAREILRHRIFHQRPLKPPPVGRCTLYPDDG
RAPRALPSAQRLRLFQELASLRVIHLDLSERPLTPAERDRIVAFVQGRPPKAGRKPGKVQKSVP
FEKLRGLLELPPGTGFSLESDKRPELLGDETGARIAPAFGPGWTALPLEEQDALVELLLTEAEP
ERAIAALTARWALDEATAAKLAGATLPDFHGRYGRRAVAELLPVLERETRGDPDGRVRPIRLDE
AVKLLRGGKDHSDFSREGALLDALPYYGAVLERHVAFGTGNPADPEEKRVGRVANPTVHIALNQ
LRHLVNAILARHGRPEEIVIELARDLKRSAEDRRREDKRQADNQKRNEERKRLILSLGERPTPR
NLLKLRLWEEQGPVENRRCPYSGETISMRMLLSEQVDIDHILPFSVSLDDSAANKVVCLREANR
IKRNRSPWEAFGHDSERWAGILARAEALPKNKRWRFAPDALEKLEGEGGLRARHLNDTRHLSRL
AVEYLRCVCPKVRVSPGRLTALLRRRWGIDAILAEADGPPPEVPAETLDPSPAEKNRADHRHHA
LDAVVIGCIDRSMVQRVQLAAASAEREAAAREDNIRRVLEGFKEEPWDGFRAELERRARTIVVS
HRPEHGIGGALHKETAYGPVDPPEEGFNLVVRKPIDGLSKDEINSVRDPRLRRALIDRLAIRRR
DANDPATALAKAAEDLAAQPASRGIRRVRVLKKESNPIRVEHGGNPSGPRSGGPFHKLLLAGEV
HHVDVALRADGRRWVGHWVTLFEAHGGRGADGAAAPPRLGDGERFLMRLHKGDCLKLEHKGRVR
VMQVVKLEPSSNSVVVVEPHQVKTDRSKHVKISCDQLRARGARRVTVDPLGRVRVHAPGARVGI
GGDAGRTAMEPAEDIS
SEQ ID NO: 376
MKRTSLRAYRLGVDLGANSLGWFVVWLDDHGQPEGLGPGGVRIFPDGRNPQSKQSNAAGRRLAR
SARRRRDRYLQRRGKLMGLLVKHGLMPADEPARKRLECLDPYGLRAKALDEVLPLHHVGRALFH
LNQRRGLFANRAIEQGDKDASAIKAAAGRLQTSMQACGARTLGEFLNRRHQLRATVRARSPVGG
DVQARYEFYPTRAMVDAEFEAIWAAQAPHHPTMTAEAHDTIREAIFSQRAMKRPSIGKCSLDPA
TSQDDVDGFRCAWSHPLAQRFRIWQDVRNLAVVETGPTSSRLGKEDQDKVARALLQTDQLSFDE
IRGLLGLPSDARFNLESDRRDHLKGDATGAILSARRHFGPAWHDRSLDRQIDIVALLESALDEA
AIIASLGTTHSLDEAAAQRALSALLPDGYCRLGLRAIKRVLPLMEAGRTYAEAASAAGYDHALL
PGGKLSPTGYLPYYGQWLQNDVVGSDDERDTNERRWGRLPNPTVHIGIGQLRRVVNELIRWHGP
PAEITVELTRDLKLSPRRLAELEREQAENQRKNDKRTSLLRKLGLPASTHNLLKLRLWDEQGDV
ASECPYTGEAIGLERLVSDDVDIDHLIPFSISWDDSAANKVVCMRYANREKGNRTPFEAFGHRQ
GRPYDWADIAERAARLPRGKRWRFGPGARAQFEELGDFQARLLNETSWLARVAKQYLAAVTHPH
RIHVLPGRLTALLRATWELNDLLPGSDDRAAKSRKDHRHHAIDALVAALTDQALLRRMANAHDD
TRRKIEVLLPWPTFRIDLETRLKAMLVSHKPDHGLQARLHEDTAYGTVEHPETEDGANLVYRKT
FVDISEKEIDRIRDRRLRDLVRAHVAGERQQGKTLKAAVLSFAQRRDIAGHPNGIRHVRLTKSI
KPDYLVPIRDKAGRIYKSYNAGENAFVDILQAESGRWIARATTVFQANQANESHDAPAAQPIMR
VFKGDMLRIDHAGAEKFVKIVRLSPSNNLLYLVEHHQAGVFQTRHDDPEDSFRWLFASFDKLRE
WNAELVRIDTLGQPWRRKRGLETGSEDATRIGWTRPKKWP
SEQ ID NO: 377
MERIFGFDIGTTSIGFSVIDYSSTQSAGNIQRLGVRIFPEARDPDGTPLNQQRRQKRMMRRQLR
RRRIRRKALNETLHEAGFLPAYGSADWPVVMADEPYELRRRGLEEGLSAYEFGRAIYHLAQHRH
FKGRELEESDTPDPDVDDEKEAANERAATLKALKNEQTTLGAWLARRPPSDRKRGIHAHRNVVA
EEFERLWEVQSKFHPALKSEEMRARISDTIFAQRPVFWRKNTLGECRFMPGEPLCPKGSWLSQQ
RRMLEKLNNLAIAGGNARPLDAEERDAILSKLQQQASMSWPGVRSALKALYKQRGEPGAEKSLK
FNLELGGESKLLGNALEAKLADMFGPDWPAHPRKQEIRHAVHERLWAADYGETPDKKRVIILSE
KDRKAHREAAANSFVADFGITGEQAAQLQALKLPTGWEPYSIPALNLFLAELEKGERFGALVNG
PDWEGWRRTNFPHRNQPTGEILDKLPSPASKEERERISQLRNPTVVRTQNELRKVVNNLIGLYG
KPDRIRIEVGRDVGKSKREREEIQSGIRRNEKQRKKATEDLIKNGIANPSRDDVEKWILWKEGQ
ERCPYTGDQIGFNALFREGRYEVEHIWPRSRSFDNSPRNKTLCRKDVNIEKGNRMPFEAFGHDE
DRWSAIQIRLQGMVSAKGGTGMSPGKVKRFLAKTMPEDFAARQLNDTRYAAKQILAQLKRLWPD
MGPEAPVKVEAVTGQVTAQLRKLWTLNNILADDGEKTRADHRHHAIDALTVACTHPGMTNKLSR
YWQLRDDPRAEKPALTPPWDTIRADAEKAVSEIVVSHRVRKKVSGPLHKETTYGDTGTDIKTKS
GTYRQFVTRKKIESLSKGELDEIRDPRIKEIVAAHVAGRGGDPKKAFPPYPCVSPGGPEIRKVR
LTSKQQLNLMAQTGNGYADLGSNHHIAIYRLPDGKADFEIVSLFDASRRLAQRNPIVQRTRADG
ASFVMSLAAGEAIMIPEGSKKGIWIVQGVWASGQVVLERDTDADHSTTTRPMPNPILKDDAKKV
SIDPIGRVRPSND
SEQ ID NO: 378
MNKRILGLDTGTNSLGWAVVDWDEHAQSYELIKYGDVIFQEGVKIEKGIESSKAAERSGYKAIR
KQYFRRRLRKIQVLKVLVKYHLCPYLSDDDLRQWHLQKQYPKSDELMLWQRTSDEEGKNPYYDR
HRCLHEKLDLTVEADRYTLGRALYHLTQRRGFLSNRLDTSADNKEDGVVKSGISQLSTEMEEAG
CEYLGDYFYKLYDAQGNKVRIRQRYTDRNKHYQHEFDAICEKQELSSELIEDLQRAIFFQLPLK
SQRHGVGRCTFERGKPRCADSHPDYEEFRMLCFVNNIQVKGPHDLELRPLTYEEREKIEPLFFR
KSKPNFDFEDIAKALAGKKNYAWIHDKEERAYKFNYRMTQGVPGCPTIAQLKSIFGDDWKTGIA
ETYTLIQKKNGSKSLQEMVDDVWNVLYSFSSVEKLKEFAHHKLQLDEESAEKFAKIKLSHSFAA
LSLKAIRKFLPFLRKGMYYTHASFFANIPTIVGKEIWNKEQNRKYIMENVGELVFNYQPKHREV
QGTIEMLIKDFLANNFELPAGATDKLYHPSMIETYPNAQRNEFGILQLGSPRTNAIRNPMAMRS
LHILRRVVNQLLKESIIDENTEVHVEYARELNDANKRRAIADRQKEQDKQHKKYGDEIRKLYKE
ETGKDIEPTQTDVLKFQLWEEQNHHCLYTGEQIGITDFIGSNPKFDIEHTIPQSVGGDSTQMNL
TLCDNRFNREVKKAKLPTELANHEEILTRIEPWKNKYEQLVKERDKQRTFAGMDKAVKDIRIQK
RHKLQMEIDYWRGKYERFTMTEVPEGFSRRQGTGIGLISRYAGLYLKSLFHQADSRNKSNVYVV
KGVATAEFRKMWGLQSEYEKKCRDNHSHHCMDAITIACIGKREYDLMAEYYRMEETFKQGRGSK
PKFSKPWATFTEDVLNIYKNLLVVHDTPNNMPKHTKKYVQTSIGKVLAQGDTARGSLHLDTYYG
AIERDGEIRYVVRRPLSSFTKPEELENIVDETVKRTIKEAIADKNFKQAIAEPIYMNEEKGILI
KKVRCFAKSVKQPINIRQHRDLSKKEYKQQYHVMNENNYLLAIYEGLVKNKVVREFEIVSYIEA
AKYYKRSQDRNIFSSIVPTHSTKYGLPLKTKLLMGQLVLMFEENPDEIQVDNTKDLVKRLYKVV
GIEKDGRIKFKYHQEARKEGLPIFSTPYKNNDDYAPIFRQSINNINILVDGIDFTIDILGKVTL
KE
SEQ ID NO: 379
MNYKMGLDIGIASVGWAVINLDLKRIEDLGVRIFDKAEHPQNGESLALPRRIARSARRRLRRRK
HRLERIRRLLVSENVLTKEEMNLLFKQKKQIDVWQLRVDALERKLNNDELARVLLHLAKRRGFK
SNRKSERNSKESSEFLKNIEENQSILAQYRSVGEMIVKDSKFAYHKRNKLDSYSNMIARDDLER
EIKLIFEKQREFNNPVCTERLEEKYLNIWSSQRPFASKEDIEKKVGFCTFEPKEKRAPKATYTF
QSFIVWEHINKLRLVSPDETRALTEIERNLLYKQAFSKNKMTYYDIRKLLNLSDDIHFKGLLYD
PKSSLKQIENIRFLELDSYHKIRKCIENVYGKDGIRMFNETDIDTFGYALTIFKDDEDIVAYLQ
NEYITKNGKRVSNLANKVYDKSLIDELLNLSFSKFAHLSMKAIRNILPYMEQGEIYSKACELAG
YNFTGPKKKEKALLLPVIPNIANPVVMRALTQSRKVVNAIIKKYGSPVSIHIELARDLSHSFDE
RKKIQKDQTENRKKNETAIKQLIEYELTKNPTGLDIVKFKLWSEQQGRCMYSLKPIELERLLEP
GYVEVDHILPYSRSLDDSYANKVLVLTKENREKGNHTPVEYLGLGSERWKKFEKFVLANKQFSK
KKKQNLLRLRYEETEEKEFKERNLNDTRYISKFFANFIKEHLKFADGDGGQKVYTINGKITAHL
RSRWDFNKNREESDLHHAVDAVIVACATQGMIKKITEFYKAREQNKESAKKKEPIFPQPWPHFA
DELKARLSKFPQESIEAFALGNYDRKKLESLRPVFVSRMPKRSVTGAAHQETLRRCVGIDEQSG
KIQTAVKTKLSDIKLDKDGHFPMYQKESDPRTYEAIRQRLLEHNNDPKKAFQEPLYKPKKNGEP
GPVIRTVKIIDTKNKVVHLDGSKTVAYNSNIVRTDVFEKDGKYYCVPVYTMDIMKGTLPNKAIE
ANKPYSEWKEMTEEYTFQFSLFPNDLVRIVLPREKTIKTSTNEEIIIKDIFAYYKTIDSATGGL
ELISHDRNFSLRGVGSKTLKRFEKYQVDVLGNIHKVKGEKRVGLAAPTNQKKGKTVDSLQSVSD
SEQ ID NO: 380
MRRLGLDLGTNSIGWCLLDLGDDGEPVSIFRTGARIFSDGRDPKSLGSLKATRREARLTRRRRD
RFIQRQKNLINALVKYGLMPADEIQRQALAYKDPYPIRKKALDEAIDPYEMGRAIFHINQRRGF
KSNRKSADNEAGVVKQSIADLEMKLGEAGARTIGEFLADRQATNDTVRARRLSGTNALYEFYPD
RYMLEQEFDTLWAKQAAFNPSLYIEAARERLKEIVFFQRKLKPQEVGRCIFLSDEDRISKALPS
FQRFRIYQELSNLAWIDHDGVAHRITASLALRDHLFDELEHKKKLTFKAMRAILRKQGVVDYPV
GFNLESDNRDHLIGNLTSCIMRDAKKMIGSAWDRLDEEEQDSFILMLQDDQKGDDEVRSILTQQ
YGLSDDVAEDCLDVRLPDGHGSLSKKAIDRILPVLRDQGLIYYDAVKEAGLGEANLYDPYAALS
DKLDYYGKALAGHVMGASGKFEDSDEKRYGTISNPTVHIALNQVRAVVNELIRLHGKPDEVVIE
IGRDLPMGADGKRELERFQKEGRAKNERARDELKKLGHIDSRESRQKFQLWEQLAKEPVDRCCP
FTGKMMSISDLFSDKVEIEHLLPFSLTLDDSMANKTVCFRQANRDKGNRAPFDAFGNSPAGYDW
QEILGRSQNLPYAKRWRFLPDAMKRFEADGGFLERQLNDTRYISRYTTEYISTIIPKNKIWVVT
GRLTSLLRGFWGLNSILRGHNTDDGTPAKKSRDDHRHHAIDAIVVGMTSRGLLQKVSKAARRSE
DLDLTRLFEGRIDPWDGFRDEVKKHIDAIIVSHRPRKKSQGALHNDTAYGIVEHAENGASTVVH
RVPITSLGKQSDIEKVRDPLIKSALLNETAGLSGKSFENAVQKWCADNSIKSLRIVETVSIIPI
TDKEGVAYKGYKGDGNAYMDIYQDPTSSKWKGEIVSRFDANQKGFIPSWQSQFPTARLIMRLRI
NDLLKLQDGEIEEIYRVQRLSGSKILMAPHTEANVDARDRDKNDTFKLTSKSPGKLQSASARKV
HISPTGLIREG
SEQ ID NO: 381
MKNILGLDLGLSSIGWSVIRENSEEQELVAMGSRVVSLTAAELSSFTQGNGVSINSQRTQKRTQ
RKGYDRYQLRRTLLRNKLDTLGMLPDDSLSYLPKLQLWGLRAKAVTQRIELNELGRVLLHLNQK
RGYKSIKSDFSGDKKITDYVKTVKTRYDELKEMRLTIGELFFRRLTENAFFRCKEQVYPRQAYV
EEFDCIMNCQRKFYPDILTDETIRCIRDEIIYYQRPLKSCKYLVSRCEFEKRFYLNAAGKKTEA
GPKVSPRTSPLFQVCRLWESINNIVVKDRRNEIVFISAEQRAALFDFLNTHEKLKGSDLLKLLG
LSKTYGYRLGEQFKTGIQGNKTRVEIERALGNYPDKKRLLQFNLQEESSSMVNTETGEIIPMIS
LSFEQEPLYRLWHVLYSIDDREQLQSVLRQKFGIDDDEVLERLSAIDLVKAGFGNKSSKAIRRI
LPFLQLGMNYAEACEAAGYNHSNNYTKAENEARALLDRLPAIKKNELRQPVVEKILNQMVNVVN
ALMEKYGRFDEIRVELARELKQSKEERSNTYKSINKNQRENEQIAKRIVEYGVPTRSRIQKYKM
WEESKHCCIYCGQPVDVGDFLRGFDVEVEHIIPKSLYFDDSFANKVCSCRSCNKEKNNRTAYDY
MKSKGEKALSDYVERVNTMYTNNQISKTKWQNLLTPVDKISIDFIDRQLRESQYIARKAKEILT
SICYNVTATSGSVTSFLRHVWGWDTVLHDLNFDRYKKVGLTEVIEVNHRGSVIRREQIKDWSKR
FDHRHHAIDALTIACTKQAYIQRLNNLRAEEGPDFNKMSLERYIQSQPHFSVAQVREAVDRILV
SFRAGKRAVTPGKRYIRKNRKRISVQSVLIPRGALSEESVYGVIHVWEKDEQGHVIQKQRAVMK
YPITSINREMLDKEKVVDKRIHRILSGRLAQYNDNPKEAFAKPVYIDKECRIPIRTVRCFAKPA
INTLVPLKKDDKGNPVAWVNPGNNHHVAIYRDEDGKYKERTVTFWEAVDRCRVGIPAIVTQPDT
IWDNILQRNDISENVLESLPDVKWQFVLSLQQNEMFILGMNEEDYRYAMDQQDYALLNKYLYRV
QKLSKSDYSFRYHTETSVEDKYDGKPNLKLSMQMGKLKRVSIKSLLGLNPHKVHISVLGEIKEI
S
SEQ ID NO: 382
MAEKQHRWGLDIGTNSIGWAVIALIEGRPAGLVATGSRIFSDGRNPKDGSSLAVERRGPRQMRR
RRDRYLRRRDRFMQALINVGLMPGDAAARKALVTENPYVLRQRGLDQALTLPEFGRALFHLNQR
RGFQSNRKTDRATAKESGKVKNAIAAFRAGMGNARTVGEALARRLEDGRPVRARMVGQGKDEHY
ELYIAREWIAQEFDALWASQQRFHAEVLADAARDRLRAILLFQRKLLPVPVGKCFLEPNQPRVA
AALPSAQRFRLMQELNHLRVMTLADKRERPLSFQERNDLLAQLVARPKCGFDMLRKIVFGANKE
AYRFTIESERRKELKGCDTAAKLAKVNALGTRWQALSLDEQDRLVCLLLDGENDAVLADALREH
YGLTDAQIDTLLGLSFEDGHMRLGRSALLRVLDALESGRDEQGLPLSYDKAVVAAGYPAHTADL
ENGERDALPYYGELLWRYTQDAPTAKNDAERKFGKIANPTVHIGLNQLRKLVNALIQRYGKPAQ
IVVELARNLKAGLEEKERIKKQQTANLERNERIRQKLQDAGVPDNRENRLRMRLFEELGQGNGL
GTPCIYSGRQISLQRLFSNDVQVDHILPFSKTLDDSFANKVLAQHDANRYKGNRGPFEAFGANR
DGYAWDDIRARAAVLPRNKRNRFAETAMQDWLHNETDFLARQLTDTAYLSRVARQYLTAICSKD
DVYVSPGRLTAMLRAKWGLNRVLDGVMEEQGRPAVKNRDDHRHHAIDAVVIGATDRAMLQQVAT
LAARAREQDAERLIGDMPTPWPNFLEDVRAAVARCVVSHKPDHGPEGGLHNDTAYGIVAGPFED
GRYRVRHRVSLFDLKPGDLSNVRCDAPLQAELEPIFEQDDARAREVALTALAERYRQRKVWLEE
LMSVLPIRPRGEDGKTLPDSAPYKAYKGDSNYCYELFINERGRWDGELISTFRANQAAYRRFRN
DPARFRRYTAGGRPLLMRLCINDYIAVGTAAERTIFRVVKMSENKITLAEHFEGGTLKQRDADK
DDPFKYLTKSPGALRDLGARRIFVDLIGRVLDPGIKGD
SEQ ID NO: 383
MIERILGVDLGISSLGWAIVEYDKDDEAANRIIDCGVRLFTAAETPKKKESPNKARREARGIRR
VLNRRRVRMNMIKKLFLRAGLIQDVDLDGEGGMFYSKANRADVWELRHDGLYRLLKGDELARVL
IHIAKHRGYKFIGDDEADEESGKVKKAGVVLRQNFEAAGCRTVGEWLWRERGANGKKRNKHGDY
EISIHRDLLVEEVEAIFVAQQEMRSTIATDALKAAYREIAFFVRPMQRIEKMVGHCTYFPEERR
APKSAPTAEKFIAISKFFSTVIIDNEGWEQKIIERKTLEELLDFAVSREKVEFRHLRKFLDLSD
NEIFKGLHYKGKPKTAKKREATLFDPNEPTELEFDKVEAEKKAWISLRGAAKLREALGNEFYGR
FVALGKHADEATKILTYYKDEGQKRRELTKLPLEAEMVERLVKIGFSDFLKLSLKAIRDILPAM
ESGARYDEAVLMLGVPHKEKSAILPPLNKTDIDILNPTVIRAFAQFRKVANALVRKYGAFDRVH
FELAREINTKGEIEDIKESQRKNEKERKEAADWIAETSFQVPLTRKNILKKRLYIQQDGRCAYT
GDVIELERLFDEGYCEIDHILPRSRSADDSFANKVLCLARANQQKTDRTPYEWFGHDAARWNAF
ETRTSAPSNRVRTGKGKIDRLLKKNFDENSEMAFKDRNLNDTRYMARAIKTYCEQYWVFKNSHT
KAPVQVRSGKLTSVLRYQWGLESKDRESHTHHAVDAIIIAFSTQGMVQKLSEYYRFKETHREKE
RPKLAVPLANFRDAVEEATRIENTETVKEGVEVKRLLISRPPRARVTGQAHEQTAKPYPRIKQV
KNKKKWRLAPIDEEKFESFKADRVASANQKNFYETSTIPRVDVYHKKGKFHLVPIYLHEMVLNE
LPNLSLGTNPEAMDENFFKFSIFKDDLISIQTQGTPKKPAKIIMGYFKNMHGANMVLSSINNSP
CEGFTCTPVSMDKKHKDKCKLCPEENRIAGRCLQGFLDYWSQEGLRPPRKEFECDQGVKFALDV
KKYQIDPLGYYYEVKQEKRLGTIPQMRSAKKLVKK
SEQ ID NO: 384
MNNSIKSKPEVTIGLDLGVGSVGWAIVDNETNIIHHLGSRLFSQAKTAEDRRSFRGVRRLIRRR
KYKLKRFVNLIWKYNSYFGFKNKEDILNNYQEQQKLHNTVLNLKSEALNAKIDPKALSWILHDY
LKNRGHFYEDNRDFNVYPTKELAKYFDKYGYYKGIIDSKEDNDNKLEEELTKYKFSNKHWLEEV
KKVLSNQTGLPEKFKEEYESLFSYVRNYSEGPGSINSVSPYGIYHLDEKEGKVVQKYNNIWDKT
IGKCNIFPDEYRAPKNSPIAMIFNEINELSTIRSYSIYLTGWFINQEFKKAYLNKLLDLLIKTN
GEKPIDARQFKKLREETIAESIGKETLKDVENEEKLEKEDHKWKLKGLKLNTNGKIQYNDLSSL
AKFVHKLKQHLKLDFLLEDQYATLDKINFLQSLFVYLGKHLRYSNRVDSANLKEFSDSNKLFER
ILQKQKDGLFKLFEQTDKDDEKILAQTHSLSTKAMLLAITRMTNLDNDEDNQKNNDKGWNFEAI
KNFDQKFIDITKKNNNLSLKQNKRYLDDRFINDAILSPGVKRILREATKVFNAILKQFSEEYDV
TKVVIELARELSEEKELENTKNYKKLIKKNGDKISEGLKALGISEDEIKDILKSPTKSYKFLLW
LQQDHIDPYSLKEIAFDDIFTKTEKFEIDHIIPYSISFDDSSSNKLLVLAESNQAKSNQTPYEF
ISSGNAGIKWEDYEAYCRKFKDGDSSLLDSTQRSKKFAKMMKTDTSSKYDIGFLARNLNDTRYA
TIVFRDALEDYANNHLVEDKPMFKVVCINGSVTSFLRKNFDDSSYAKKDRDKNIHHAVDASIIS
IFSNETKTLFNQLTQFADYKLFKNTDGSWKKIDPKTGVVTEVTDENWKQIRVRNQVSEIAKVIE
KYIQDSNIERKARYSRKIENKTNISLFNDTVYSAKKVGYEDQIKRKNLKTLDIHESAKENKNSK
VKRQFVYRKLVNVSLLNNDKLADLFAEKEDILMYRANPWVINLAEQIFNEYTENKKIKSQNVFE
KYMLDLTKEFPEKFSEFLVKSMLRNKTAIIYDDKKNIVHRIKRLKMLSSELKENKLSNVIIRSK
NQSGTKLSYQDTINSLALMIMRSIDPTAKKQYIRVPLNTLNLHLGDHDFDLHNMDAYLKKPKFV
KYLKANEIGDEYKPWRVLTSGTLLIHKKDKKLMYISSFQNLNDVIEIKNLIETEYKENDDSDSK
KKKKANRFLMTLSTILNDYILLDAKDNFDILGLSKNRIDEILNSKLGLDKIVK
SEQ ID NO: 385
MGGSEVGTVPVTWRLGVDVGERSIGLAAVSYEEDKPKEILAAVSWIHDGGVGDERSGASRLALR
GMARRARRLRRFRRARLRDLDMLLSELGWTPLPDKNVSPVDAWLARKRLAEEYVVDETERRRLL
GYAVSHMARHRGWRNPWTTIKDLKNLPQPSDSWERTRESLEARYSVSLEPGTVGQWAGYLLQRA
PGIRLNPTQQSAGRRAELSNATAFETRLRQEDVLWELRCIADVQGLPEDVVSNVIDAVFCQKRP
SVPAERIGRDPLDPSQLRASRACLEFQEYRIVAAVANLRIRDGSGSRPLSLEERNAVIEALLAQ
TERSLTWSDIALEILKLPNESDLTSVPEEDGPSSLAYSQFAPFDETSARIAEFIAKNRRKIPTF
AQWWQEQDRTSRSDLVAALADNSIAGEEEQELLVHLPDAELEALEGLALPSGRVAYSRLTLSGL
TRVMRDDGVDVHNARKTCFGVDDNWRPPLPALHEATGHPVVDRNLAILRKFLSSATMRWGPPQS
IVVELARGASESRERQAEEEAARRAHRKANDRIRAELRASGLSDPSPADLVRARLLELYDCHCM
YCGAPISWENSELDHIVPRTDGGSNRHENLAITCGACNKEKGRRPFASWAETSNRVQLRDVIDR
VQKLKYSGNMYWTRDEFSRYKKSVVARLKRRTSDPEVIQSIESTGYAAVALRDRLLSYGEKNGV
AQVAVFRGGVTAEARRWLDISIERLFSRVAIFAQSTSTKRLDRRHHAVDAVVLTTLTPGVAKTL
ADARSRRVSAEFWRRPSDVNRHSTEEPQSPAYRQWKESCSGLGDLLISTAARDSIAVAAPLRLR
PTGALHEETLRAFSEHTVGAAWKGAELRRIVEPEVYAAFLALTDPGGRFLKVSPSEDVLPADEN
RHIVLSDRVLGPRDRVKLFPDDRGSIRVRGGAAYIASFHHARVFRWGSSHSPSFALLRVSLADL
AVAGLLRDGVDVFTAELPPWTPAWRYASIALVKAVESGDAKQVGWLVPGDELDFGPEGVTTAAG
DLSMFLKYFPERHWVVTGFEDDKRINLKPAFLSAEQAEVLRTERSDRPDTLTEAGEILAQFFPR
CWRATVAKVLCHPGLTVIRRTALGQPRWRRGHLPYSWRPWSADPWSGGTP
SEQ ID NO: 386
MHNKKNITIGFDLGIASIGWAIIDSTTSKILDWGTRTFEERKTANERRAFRSTRRNIRRKAYRN
QRFINLILKYKDLFELKNISDIQRANKKDTENYEKIISFFTEIYKKCAAKHSNILEVKVKALDS
KIEKLDLIWILHDYLENRGFFYDLEEENVADKYEGIEHPSILLYDFFKKNGFFKSNSSIPKDLG
GYSFSNLQWVNEIKKLFEVQEINPEFSEKFLNLFTSVRDYAKGPGSEHSASEYGIFQKDEKGKV
FKKYDNIWDKTIGKCSFFVEENRSPVNYPSYEIFNLLNQLINLSTDLKTTNKKIWQLSSNDRNE
LLDELLKVKEKAKIISISLKKNEIKKIILKDFGFEKSDIDDQDTIEGRKIIKEEPTTKLEVTKH
LLATIYSHSSDSNWININNILEFLPYLDAICIILDREKSRGQDEVLKKLTEKNIFEVLKIDREK
QLDFVKSIFSNTKFNFKKIGNFSLKAIREFLPKMFEQNKNSEYLKWKDEEIRRKWEEQKSKLGK
TDKKTKYLNPRIFQDEIISPGTKNTFEQAVLVLNQIIKKYSKENIIDAIIIESPREKNDKKTIE
EIKKRNKKGKGKTLEKLFQILNLENKGYKLSDLETKPAKLLDRLRFYHQQDGIDLYTLDKINID
QLINGSQKYEIEHIIPYSMSYDNSQANKILTEKAENLKKGKLIASEYIKRNGDEFYNKYYEKAK
ELFINKYKKNKKLDSYVDLDEDSAKNRFRFLTLQDYDEFQVEFLARNLNDTRYSTKLFYHALVE
HFENNEFFTYIDENSSKHKVKISTIKGHVTKYFRAKPVQKNNGPNENLNNNKPEKIEKNRENNE
HHAVDAAIVAIIGNKNPQIANLLTLADNKTDKKFLLHDENYKENIETGELVKIPKFEVDKLAKV
EDLKKIIQEKYEEAKKHTAIKFSRKTRTILNGGLSDETLYGFKYDEKEDKYFKIIKKKLVTSKN
EELKKYFENPFGKKADGKSEYTVLMAQSHLSEFNKLKEIFEKYNGFSNKTGNAFVEYMNDLALK
EPTLKAEIESAKSVEKLLYYNFKPSDQFTYHDNINNKSFKRFYKNIRIIEYKSIPIKFKILSKH
DGGKSFKDTLFSLYSLVYKVYENGKESYKSIPVTSQMRNFGIDEFDFLDENLYNKEKLDIYKSD
FAKPIPVNCKPVFVLKKGSILKKKSLDIDDFKETKETEEGNYYFISTISKRFNRDTAYGLKPLK
LSVVKPVAEPSTNPIFKEYIPIHLDELGNEYPVKIKEHTDDEKLMCTIK

[1029] Nucleic Acids Encoding Cas9 Molecules

[1030] Nucleic acids encoding the Cas9 molecules or Cas9 polypeptides, e.g., an eaCas9 molecule or eaCas9 polypeptides are provided herein.

[1031] Exemplary nucleic acids encoding Cas9 molecules or Cas9 polypeptides are described in Cong et al., SCIENCE 2013, 399(6121):819-823; Wang et al., CELL 2013, 153(4):910-918; Mali et al., SCIENCE 2013, 399(6121):823-826; Jinek et al., SCIENCE 2012, 337(6096):816-821. Another exemplary nucleic acid encoding a Cas9 molecule or Cas9 polypeptide is shown in FIG. 8.

[1032] In an embodiment, a nucleic acid encoding a Cas9 molecule or Cas9 polypeptide can be a synthetic nucleic acid sequence. For example, the synthetic nucleic acid molecule can be chemically modified, e.g., as described in Section VIII. In an embodiment, the Cas9 mRNA has one or more (e.g., all of the following properties: it is capped, polyadenylated, substituted with 5-methylcytidine and/or pseudouridine.

[1033] In addition, or alternatively, the synthetic nucleic acid sequence can be codon optimized, e.g., at least one non-common codon or less-common codon has been replaced by a common codon. For example, the synthetic nucleic acid can direct the synthesis of an optimized messenger mRNA, e.g., optimized for expression in a mammalian expression system, e.g., described herein.

[1034] In addition, or alternatively, a nucleic acid encoding a Cas9 molecule or Cas9 polypeptide may comprise a nuclear localization sequence (NLS). Nuclear localization sequences are known in the art.

[1035] Provided below is an exemplary codon optimized nucleic acid sequence encoding a Cas9 molecule of S. pyogenes.

(SEQ ID NO: 22)

ATGGATAAAA AGTACAGCAT CGGGCTGGAC ATCGGTACAA
ACTCAGTGGG GTGGGCCGTG ATTACGGACG AGTACAAGGT
ACCCTCCAAA AAATTTAAAG TGCTGGGTAA CACGGACAGA
CACTCTATAA AGAAAAATCT TATTGGAGCC TTGCTGTTCG
ACTCAGGCGA GACAGCCGAA GCCACAAGGT TGAAGCGGAC
CGCCAGGAGG CGGTATACCA GGAGAAAGAA CCGCATATGC
TACCTGCAAG AAATCTTCAG TAACGAGATG GCAAAGGTTG
ACGATAGCTT TTTCCATCGC CTGGAAGAAT CCTTTCTTGT
TGAGGAAGAC AAGAAGCACG AACGGCACCC CATCTTTGGC
AATATTGTCG ACGAAGTGGC ATATCACGAA AAGTACCCGA
CTATCTACCA CCTCAGGAAG AAGCTGGTGG ACTCTACCGA
TAAGGCGGAC CTCAGACTTA TTTATTTGGC ACTCGCCCAC
ATGATTAAAT TTAGAGGACA TTTCTTGATC GAGGGCGACC
TGAACCCGGA CAACAGTGAC GTCGATAAGC TGTTCATCCA
ACTTGTGCAG ACCTACAATC AACTGTTCGA AGAAAACCCT
ATAAATGCTT CAGGAGTCGA CGCTAAAGCA ATCCTGTCCG
CGCGCCTCTC AAAATCTAGA AGACTTGAGA ATCTGATTGC
TCAGTTGCCC GGGGAAAAGA AAAATGGATT GTTTGGCAAC
CTGATCGCCC TCAGTCTCGG ACTGACCCCA AATTTCAAAA
GTAACTTCGA CCTGGCCGAA GACGCTAAGC TCCAGCTGTC
CAAGGACACA TACGATGACG ACCTCGACAA TCTGCTGGCC
CAGATTGGGG ATCAGTACGC CGATCTCTTT TTGGCAGCAA
AGAACCTGTC CGACGCCATC CTGTTGAGCG ATATCTTGAG
AGTGAACACC GAAATTACTA AAGCACCCCT TAGCGCATCT
ATGATCAAGC GGTACGACGA GCATCATCAG GATCTGACCC
TGCTGAAGGC TCTTGTGAGG CAACAGCTCC CCGAAAAATA
CAAGGAAATC TTCTTTGACC AGAGCAAAAA CGGCTACGCT
GGCTATATAG ATGGTGGGGC CAGTCAGGAG GAATTCTATA
AATTCATCAA GCCCATTCTC GAGAAAATGG ACGGCACAGA
GGAGTTGCTG GTCAAACTTA ACAGGGAGGA CCTGCTGCGG
AAGCAGCGGA CCTTTGACAA CGGGTCTATC CCCCACCAGA
TTCATCTGGG CGAACTGCAC GCAATCCTGA GGAGGCAGGA
GGATTTTTAT CCTTTTCTTA AAGATAACCG CGAGAAAATA
GAAAAGATTC TTACATTCAG GATCCCGTAC TACGTGGGAC
CTCTCGCCCG GGGCAATTCA CGGTTTGCCT GGATGACAAG
GAAGTCAGAG GAGACTATTA CACCTTGGAA CTTCGAAGAA
GTGGTGGACA AGGGTGCATC TGCCCAGTCT TTCATCGAGC
GGATGACAAA TTTTGACAAG AACCTCCCTA ATGAGAAGGT
GCTGCCCAAA CATTCTCTGC TCTACGAGTA CTTTACCGTC
TACAATGAAC TGACTAAAGT CAAGTACGTC ACCGAGGGAA
TGAGGAAGCC GGCATTCCTT AGTGGAGAAC AGAAGAAGGC
GATTGTAGAC CTGTTGTTCA AGACCAACAG GAAGGTGACT
GTGAAGCAAC TTAAAGAAGA CTACTTTAAG AAGATCGAAT
GTTTTGACAG TGTGGAAATT TCAGGGGTTG AAGACCGCTT
CAATGCGTCA TTGGGGACTT ACCATGATCT TCTCAAGATC
ATAAAGGACA AAGACTTCCT GGACAACGAA GAAAATGAGG
ATATTCTCGA AGACATCGTC CTCACCCTGA CCCTGTTCGA
AGACAGGGAA ATGATAGAAG AGCGCTTGAA AACCTATGCC
CACCTCTTCG ACGATAAAGT TATGAAGCAG CTGAAGCGCA
GGAGATACAC AGGATGGGGA AGATTGTCAA GGAAGCTGAT
CAATGGAATT AGGGATAAAC AGAGTGGCAA GACCATACTG
GATTTCCTCA AATCTGATGG CTTCGCCAAT AGGAACTTCA
TGCAACTGAT TCACGATGAC TCTCTTACCT TCAAGGAGGA
CATTCAAAAG GCTCAGGTGA GCGGGCAGGG AGACTCCCTT
CATGAACACA TCGCGAATTT GGCAGGTTCC CCCGCTATTA
AAAAGGGCAT CCTTCAAACT GTCAAGGTGG TGGATGAATT
GGTCAAGGTA ATGGGCAGAC ATAAGCCAGA AAATATTGTG
ATCGAGATGG CCCGCGAAAA CCAGACCACA CAGAAGGGCC
AGAAAAATAG TAGAGAGCGG ATGAAGAGGA TCGAGGAGGG
CATCAAAGAG CTGGGATCTC AGATTCTCAA AGAACACCCC
GTAGAAAACA CACAGCTGCA GAACGAAAAA TTGTACTTGT
ACTATCTGCA GAACGGCAGA GACATGTACG TCGACCAAGA
ACTTGATATT AATAGACTGT CCGACTATGA CGTAGACCAT
ATCGTGCCCC AGTCCTTCCT GAAGGACGAC TCCATTGATA
ACAAAGTCTT GACAAGAAGC GACAAGAACA GGGGTAAAAG
TGATAATGTG CCTAGCGAGG AGGTGGTGAA AAAAATGAAG
AACTACTGGC GACAGCTGCT TAATGCAAAG CTCATTACAC
AACGGAAGTT CGATAATCTG ACGAAAGCAG AGAGAGGTGG
CTTGTCTGAG TTGGACAAGG CAGGGTTTAT TAAGCGGCAG
CTGGTGGAAA CTAGGCAGAT CACAAAGCAC GTGGCGCAGA
TTTTGGACAG CCGGATGAAC ACAAAATACG ACGAAAATGA
TAAACTGATA CGAGAGGTCA AAGTTATCAC GCTGAAAAGC
AAGCTGGTGT CCGATTTTCG GAAAGACTTC CAGTTCTACA
AAGTTCGCGA GATTAATAAC TACCATCATG CTCACGATGC
GTACCTGAAC GCTGTTGTCG GGACCGCCTT GATAAAGAAG
TACCCAAAGC TGGAATCCGA GTTCGTATAC GGGGATTACA
AAGTGTACGA TGTGAGGAAA ATGATAGCCA AGTCCGAGCA
GGAGATTGGA AAGGCCACAG CTAAGTACTT CTTTTATTCT
AACATCATGA ATTTTTTTAA GACGGAAATT ACCCTGGCCA
ACGGAGAGAT CAGAAAGCGG CCCCTTATAG AGACAAATGG
TGAAACAGGT GAAATCGTCT GGGATAAGGG CAGGGATTTC
GCTACTGTGA GGAAGGTGCT GAGTATGCCA CAGGTAAATA
TCGTGAAAAA AACCGAAGTA CAGACCGGAG GATTTTCCAA
GGAAAGCATT TTGCCTAAAA GAAACTCAGA CAAGCTCATC
GCCCGCAAGA AAGATTGGGA CCCTAAGAAA TACGGGGGAT
TTGACTCACC CACCGTAGCC TATTCTGTGC TGGTGGTAGC
TAAGGTGGAA AAAGGAAAGT CTAAGAAGCT GAAGTCCGTG
AAGGAACTCT TGGGAATCAC TATCATGGAA AGATCATCCT
TTGAAAAGAA CCCTATCGAT TTCCTGGAGG CTAAGGGTTA
CAAGGAGGTC AAGAAAGACC TCATCATTAA ACTGCCAAAA
TACTCTCTCT TCGAGCTGGA AAATGGCAGG AAGAGAATGT
TGGCCAGCGC CGGAGAGCTG CAAAAGGGAA ACGAGCTTGC
TCTGCCCTCC AAATATGTTA ATTTTCTCTA TCTCGCTTCC
CACTATGAAA AGCTGAAAGG GTCTCCCGAA GATAACGAGC
AGAAGCAGCT GTTCGTCGAA CAGCACAAGC ACTATCTGGA
TGAAATAATC GAACAAATAA GCGAGTTCAG CAAAAGGGTT
ATCCTGGCGG ATGCTAATTT GGACAAAGTA CTGTCTGCTT
ATAACAAGCA CCGGGATAAG CCTATTAGGG AACAAGCCGA
GAATATAATT CACCTCTTTA CACTCACGAA TCTCGGAGCC
CCCGCCGCCT TCAAATACTT TGATACGACT ATCGACCGGA
AACGGTATAC CAGTACCAAA GAGGTCCTCG ATGCCACCCT
CATCCACCAG TCAATTACTG GCCTGTACGA AACACGGATC
GACCTCTCTC AACTGGGCGG CGACTAG

[1036] Provided below is the corresponding amino acid sequence of a S. pyogenes Cas9 molecule.

(SEQ ID NO: 23)

[sequence omitted]

[1037] Provided below is an exemplary codon optimized nucleic acid sequence encoding a Cas9 molecule of N. meningitidis.

(SEQ ID NO: 24)

ATGGCCGCCTTCAAGCCCAACCCCATCAACTACATCCTGGGCCTGGACAT
CGGCATCGCCAGCGTGGGCTGGGCCATGGTGGAGATCGACGAGGACGAGA
ACCCCATCTGCCTGATCGACCTGGGTGTGCGCGTGTTCGAGCGCGCTGAG
GTGCCCAAGACTGGTGACAGTCTGGCTATGGCTCGCCGGCTTGCTCGCTC
TGTTCGGCGCCTTACTCGCCGGCGCGCTCACCGCCTTCTGCGCGCTCGCC
GCCTGCTGAAGCGCGAGGGTGTGCTGCAGGCTGCCGACTTCGACGAGAAC
GGCCTGATCAAGAGCCTGCCCAACACTCCTTGGCAGCTGCGCGCTGCCGC
TCTGGACCGCAAGCTGACTCCTCTGGAGTGGAGCGCCGTGCTGCTGCACC
TGATCAAGCACCGCGGCTACCTGAGCCAGCGCAAGAACGAGGGCGAGACC
GCCGACAAGGAGCTGGGTGCTCTGCTGAAGGGCGTGGCCGACAACGCCCA
CGCCCTGCAGACTGGTGACTTCCGCACTCCTGCTGAGCTGGCCCTGAACA
AGTTCGAGAAGGAGAGCGGCCACATCCGCAACCAGCGCGGCGACTACAGC
CACACCTTCAGCCGCAAGGACCTGCAGGCCGAGCTGATCCTGCTGTTCGA
GAAGCAGAAGGAGTTCGGCAACCCCCACGTGAGCGGCGGCCTGAAGGAGG
GCATCGAGACCCTGCTGATGACCCAGCGCCCCGCCCTGAGCGGCGACGCC
GTGCAGAAGATGCTGGGCCACTGCACCTTCGAGCCAGCCGAGCCCAAGGC
CGCCAAGAACACCTACACCGCCGAGCGCTTCATCTGGCTGACCAAGCTGA
ACAACCTGCGCATCCTGGAGCAGGGCAGCGAGCGCCCCCTGACCGACACC
GAGCGCGCCACCCTGATGGACGAGCCCTACCGCAAGAGCAAGCTGACCTA
CGCCCAGGCCCGCAAGCTGCTGGGTCTGGAGGACACCGCCTTCTTCAAGG
GCCTGCGCTACGGCAAGGACAACGCCGAGGCCAGCACCCTGATGGAGATG
AAGGCCTACCACGCCATCAGCCGCGCCCTGGAGAAGGAGGGCCTGAAGGA
CAAGAAGAGTCCTCTGAACCTGAGCCCCGAGCTGCAGGACGAGATCGGCA
CCGCCTTCAGCCTGTTCAAGACCGACGAGGACATCACCGGCCGCCTGAAG
GACCGCATCCAGCCCGAGATCCTGGAGGCCCTGCTGAAGCACATCAGCTT
CGACAAGTTCGTGCAGATCAGCCTGAAGGCCCTGCGCCGCATCGTGCCCC
TGATGGAGCAGGGCAAGCGCTACGACGAGGCCTGCGCCGAGATCTACGGC
GACCACTACGGCAAGAAGAACACCGAGGAGAAGATCTACCTGCCTCCTAT
CCCCGCCGACGAGATCCGCAACCCCGTGGTGCTGCGCGCCCTGAGCCAGG
CCCGCAAGGTGATCAACGGCGTGGTGCGCCGCTACGGCAGCCCCGCCCGC
ATCCACATCGAGACCGCCCGCGAGGTGGGCAAGAGCTTCAAGGACCGCAA
GGAGATCGAGAAGCGCCAGGAGGAGAACCGCAAGGACCGCGAGAAGGCCG
CCGCCAAGTTCCGCGAGTACTTCCCCAACTTCGTGGGCGAGCCCAAGAGC
AAGGACATCCTGAAGCTGCGCCTGTACGAGCAGCAGCACGGCAAGTGCCT
GTACAGCGGCAAGGAGATCAACCTGGGCCGCCTGAACGAGAAGGGCTACG
TGGAGATCGACCACGCCCTGCCCTTCAGCCGCACCTGGGACGACAGCTTC
AACAACAAGGTGCTGGTGCTGGGCAGCGAGAACCAGAACAAGGGCAACCA
GACCCCCTACGAGTACTTCAACGGCAAGGACAACAGCCGCGAGTGGCAGG
AGTTCAAGGCCCGCGTGGAGACCAGCCGCTTCCCCCGCAGCAAGAAGCAG
CGCATCCTGCTGCAGAAGTTCGACGAGGACGGCTTCAAGGAGCGCAACCT
GAACGACACCCGCTACGTGAACCGCTTCCTGTGCCAGTTCGTGGCCGACC
GCATGCGCCTGACCGGCAAGGGCAAGAAGCGCGTGTTCGCCAGCAACGGC
CAGATCACCAACCTGCTGCGCGGCTTCTGGGGCCTGCGCAAGGTGCGCGC
CGAGAACGACCGCCACCACGCCCTGGACGCCGTGGTGGTGGCCTGCAGCA
CCGTGGCCATGCAGCAGAAGATCACCCGCTTCGTGCGCTACAAGGAGATG
AACGCCTTCGACGGTAAAACCATCGACAAGGAGACCGGCGAGGTGCTGCA
CCAGAAGACCCACTTCCCCCAGCCCTGGGAGTTCTTCGCCCAGGAGGTGA
TGATCCGCGTGTTCGGCAAGCCCGACGGCAAGCCCGAGTTCGAGGAGGCC
GACACCCCCGAGAAGCTGCGCACCCTGCTGGCCGAGAAGCTGAGCAGCCG
CCCTGAGGCCGTGCACGAGTACGTGACTCCTCTGTTCGTGAGCCGCGCCC
CCAACCGCAAGATGAGCGGTCAGGGTCACATGGAGACCGTGAAGAGCGCC
AAGCGCCTGGACGAGGGCGTGAGCGTGCTGCGCGTGCCCCTGACCCAGCT
GAAGCTGAAGGACCTGGAGAAGATGGTGAACCGCGAGCGCGAGCCCAAGC
TGTACGAGGCCCTGAAGGCCCGCCTGGAGGCCCACAAGGACGACCCCGCC
AAGGCCTTCGCCGAGCCCTTCTACAAGTACGACAAGGCCGGCAACCGCAC
CCAGCAGGTGAAGGCCGTGCGCGTGGAGCAGGTGCAGAAGACCGGCGTGT
GGGTGCGCAACCACAACGGCATCGCCGACAACGCCACCATGGTGCGCGTG
GACGTGTTCGAGAAGGGCGACAAGTACTACCTGGTGCCCATCTACAGCTG
GCAGGTGGCCAAGGGCATCCTGCCCGACCGCGCCGTGGTGCAGGGCAAGG
ACGAGGAGGACTGGCAGCTGATCGACGACAGCTTCAACTTCAAGTTCAGC
CTGCACCCCAACGACCTGGTGGAGGTGATCACCAAGAAGGCCCGCATGTT
CGGCTACTTCGCCAGCTGCCACCGCGGCACCGGCAACATCAACATCCGCA
TCCACGACCTGGACCACAAGATCGGCAAGAACGGCATCCTGGAGGGCATC
GGCGTGAAGACCGCCCTGAGCTTCCAGAAGTACCAGATCGACGAGCTGGG
CAAGGAGATCCGCCCCTGCCGCCTGAAGAAGCGCCCTCCTGTGCGCTAA

[1038] Provided below is the corresponding amino acid sequence of a N. meningitidis Cas9 molecule.

(SEQ ID NO: 25)

MAAFKPNPINYILGLDIGIASVGWAMVEIDEDENPICLIDLGVRVFERAE
VPKTGDSLAMARRLARSVRRLTRRRAHRLLRARRLLKREGVLQAADFDEN
GLIKSLPNTPWQLRAAALDRKLTPLEWSAVLLHLIKHRGYLSQRKNEGET
ADKELGALLKGVADNAHALQTGDFRTPAELALNKFEKESGHIRNQRGDYS
HTFSRKDLQAELILLFEKQKEFGNPHVSGGLKEGIETLLMTQRPALSGDA
VQKMLGHCTFEPAEPKAAKNTYTAERFIWLTKLNNLRILEQGSERPLTDT
ERATLMDEPYRKSKLTYAQARKLLGLEDTAFFKGLRYGKDNAEASTLMEM
KAYHAISRALEKEGLKDKKSPLNLSPELQDEIGTAFSLFKTDEDITGRLK
DRIQPEILEALLKHISFDKFVQISLKALRRIVPLMEQGKRYDEACAEIYG
DHYGKKNTEEKIYLPPIPADEIRNPVVLRALSQARKVINGVVRRYGSPAR
IHIETAREVGKSFKDRKEIEKRQEENRKDREKAAAKFREYFPNFVGEPKS
KDILKLRLYEQQHGKCLYSGKEINLGRLNEKGYVEIDHALPFSRTWDDSF
NNKVLVLGSENQNKGNQTPYEYFNGKDNSREWQEFKARVETSRFPRSKKQ
RILLQKFDEDGFKERNLNDTRYVNRFLCQFVADRMRLTGKGKKRVFASNG
QITNLLRGFWGLRKVRAENDRHHALDAVVVACSTVAMQQKITRFVRYKEM
NAFDGKTIDKETGEVLHQKTHFPQPWEFFAQEVMIRVFGKPDGKPEFEEA
DTPEKLRTLLAEKLSSRPEAVHEYVTPLFVSRAPNRKMSGQGHMETVKSA
KRLDEGVSVLRVPLTQLKLKDLEKMVNREREPKLYEALKARLEAHKDDPA
KAFAEPFYKYDKAGNRTQQVKAVRVEQVQKTGVWVRNHNGIADNATMVRV
DVFEKGDKYYLVPIYSWQVAKGILPDRAVVQGKDEEDWQLIDDSFNFKFS
LHPNDLVEVITKKARMFGYFASCHRGTGNINIRIHDLDHKIGKNGILEGI
GVKTALSFQKYQIDELGKEIRPCRLKKRPPVR*

[1039] Provided below is an amino acid sequence of a S. aureus Cas9 molecule.

(SEQ ID NO: 26)

MKRNYILGLDIGITSVGYGIIDYETRDVIDAGVRLFKEANVENNEGRRSK
RGARRLKRRRRHRIQRVKKLLFDYNLLTDHSELSGINPYEARVKGLSQKL
SEEEFSAALLHLAKRRGVHNVNEVEEDTGNELSTKEQISRNSKALEEKYV
AELQLERLKKDGEVRGSINRFKTSDYVKEAKQLLKVQKAYHQLDQSFIDT
YIDLLETRRTYYEGPGEGSPFGWKDIKEWYEMLMGHCTYFFEELRSVKYA
YNADLYNALNDLNNLVITRDENEKLEYYEKFQIIENVFKQKKKPTLKQIA
KEILVNEEDIKGYRVTSTGKPEFTNLKVYHDIKDITARKEIIENAELLDQ
IAKILTIYQSSEDIQEELTNLNSELTQEEIEQISNLKGYTGTHNLSLKAI
NLILDELWHTNDNQIAIFNRLKLVPKKVDLSQQKEIPTTLVDDFILSPVV
KRSFIQSIKVINAIIKKYGLPNDIIIELAREKNSKDAQKMINEMQKRNRQ
TNERIEEIIRTTGKENAKYLIEKIKLHDMQEGKCLYSLEAIPLEDLLNNP
FNYEVDHIIPRSVSFDNSFNNKVLVKQEENSKKGNRTPFQYLSSSDSKIS
YETFKKHILNLAKGKGRISKTKKEYLLEERDINRFSVQKDFINRNLVDTR
YATRGLMNLLRSYFRVNNLDVKVKSINGGFTSFLRRKWKFKKERNKGYKH
HAEDALIIANADFIFKEWKKLDKAKKVMENQMFEEKQAESMPEIETEQEY
KEIFITPHQIKHIKDFKDYKYSHRVDKKPNRELINDTLYSTRKDDKGNTL
IVNNLNGLYDKDNDKLKKLINKSPEKLLMYHHDPQTYQKLKLIMEQYGDE
KNPLYKYYEETGNYLTKYSKKDNGPVIKKIKYYGNKLNAHLDITDDYPNS
RNKVVKLSLKPYRFDVYLDNGVYKFVTVKNLDVIKKENYYEVNSKCYEEA
KKLKKISNQAEFIASFYNNDLIKINGELYRVIGVNNDLLNRIEVNMIDIT
YREYLENMNDKRPPRIIKTIASKTQSIKKYSTDILGNLYEVKSKKHPQII
KKG*

[1040] Provided below is an exemplary codon optimized nucleic acid sequence encoding a Cas9 molecule of S. aureus Cas9.

(SEQ ID NO: 39)

ATGAAAAGGAACTACATTCTGGGGCTGGACATCGGGATTACAAGCGTGGG
GTATGGGATTATTGACTATGAAACAAGGGACGTGATCGACGCAGGCGTCA
GACTGTTCAAGGAGGCCAACGTGGAAAACAATGAGGGACGGAGAAGCAAG
AGGGGAGCCAGGCGCCTGAAACGACGGAGAAGGCACAGAATCCAGAGGGT
GAAGAAACTGCTGTTCGATTACAACCTGCTGACCGACCATTCTGAGCTGA
GTGGAATTAATCCTTATGAAGCCAGGGTGAAAGGCCTGAGTCAGAAGCTG
TCAGAGGAAGAGTTTTCCGCAGCTCTGCTGCACCTGGCTAAGCGCCGAGG
AGTGCATAACGTCAATGAGGTGGAAGAGGACACCGGCAACGAGCTGTCTA
CAAAGGAACAGATCTCACGCAATAGCAAAGCTCTGGAAGAGAAGTATGTC
GCAGAGCTGCAGCTGGAACGGCTGAAGAAAGATGGCGAGGTGAGAGGGTC
AATTAATAGGTTCAAGACAAGCGACTACGTCAAAGAAGCCAAGCAGCTGC
TGAAAGTGCAGAAGGCTTACCACCAGCTGGATCAGAGCTTCATCGATACT
TATATCGACCTGCTGGAGACTCGGAGAACCTACTATGAGGGACCAGGAGA
AGGGAGCCCCTTCGGATGGAAAGACATCAAGGAATGGTACGAGATGCTGA
TGGGACATTGCACCTATTTTCCAGAAGAGCTGAGAAGCGTCAAGTACGCT
TATAACGCAGATCTGTACAACGCCCTGAATGACCTGAACAACCTGGTCAT
CACCAGGGATGAAAACGAGAAACTGGAATACTATGAGAAGTTCCAGATCA
TCGAAAACGTGTTTAAGCAGAAGAAAAAGCCTACACTGAAACAGATTGCT
AAGGAGATCCTGGTCAACGAAGAGGACATCAAGGGCTACCGGGTGACAAG
CACTGGAAAACCAGAGTTCACCAATCTGAAAGTGTATCACGATATTAAGG
ACATCACAGCACGGAAAGAAATCATTGAGAACGCCGAACTGCTGGATCAG
ATTGCTAAGATCCTGACTATCTACCAGAGCTCCGAGGACATCCAGGAAGA
GCTGACTAACCTGAACAGCGAGCTGACCCAGGAAGAGATCGAACAGATTA
GTAATCTGAAGGGGTACACCGGAACACACAACCTGTCCCTGAAAGCTATC
AATCTGATTCTGGATGAGCTGTGGCATACAAACGACAATCAGATTGCAAT
CTTTAACCGGCTGAAGCTGGTCCCAAAAAAGGTGGACCTGAGTCAGCAGA
AAGAGATCCCAACCACACTGGTGGACGATTTCATTCTGTCACCCGTGGTC
AAGCGGAGCTTCATCCAGAGCATCAAAGTGATCAACGCCATCATCAAGAA
GTACGGCCTGCCCAATGATATCATTATCGAGCTGGCTAGGGAGAAGAACA
GCAAGGACGCACAGAAGATGATCAATGAGATGCAGAAACGAAACCGGCAG
ACCAATGAACGCATTGAAGAGATTATCCGAACTACCGGGAAAGAGAACGC
AAAGTACCTGATTGAAAAAATCAAGCTGCACGATATGCAGGAGGGAAAGT
GTCTGTATTCTCTGGAGGCCATCCCCCTGGAGGACCTGCTGAACAATCCA
TTCAACTACGAGGTCGATCATATTATCCCCAGAAGCGTGTCCTTCGACAA
TTCCTTTAACAACAAGGTGCTGGTCAAGCAGGAAGAGAACTCTAAAAAGG
GCAATAGGACTCCTTTCCAGTACCTGTCTAGTTCAGATTCCAAGATCTCT
TACGAAACCTTTAAAAAGCACATTCTGAATCTGGCCAAAGGAAAGGGCCG
CATCAGCAAGACCAAAAAGGAGTACCTGCTGGAAGAGCGGGACATCAACA
GATTCTCCGTCCAGAAGGATTTTATTAACCGGAATCTGGTGGACACAAGA
TACGCTACTCGCGGCCTGATGAATCTGCTGCGATCCTATTTCCGGGTGAA
CAATCTGGATGTGAAAGTCAAGTCCATCAACGGCGGGTTCACATCTTTTC
TGAGGCGCAAATGGAAGTTTAAAAAGGAGCGCAACAAAGGGTACAAGCAC
CATGCCGAAGATGCTCTGATTATCGCAAATGCCGACTTCATCTTTAAGGA
GTGGAAAAAGCTGGACAAAGCCAAGAAAGTGATGGAGAACCAGATGTTCG
AAGAGAAGCAGGCCGAATCTATGCCCGAAATCGAGACAGAACAGGAGTAC
AAGGAGATTTTCATCACTCCTCACCAGATCAAGCATATCAAGGATTTCAA
GGACTACAAGTACTCTCACCGGGTGGATAAAAAGCCCAACAGAGAGCTGA
TCAATGACACCCTGTATAGTACAAGAAAAGACGATAAGGGGAATACCCTG
ATTGTGAACAATCTGAACGGACTGTACGACAAAGATAATGACAAGCTGAA
AAAGCTGATCAACAAAAGTCCCGAGAAGCTGCTGATGTACCACCATGATC
CTCAGACATATCAGAAACTGAAGCTGATTATGGAGCAGTACGGCGACGAG
AAGAACCCACTGTATAAGTACTATGAAGAGACTGGGAACTACCTGACCAA
GTATAGCAAAAAGGATAATGGCCCCGTGATCAAGAAGATCAAGTACTATG
GGAACAAGCTGAATGCCCATCTGGACATCACAGACGATTACCCTAACAGT
CGCAACAAGGTGGTCAAGCTGTCACTGAAGCCATACAGATTCGATGTCTA
TCTGGACAACGGCGTGTATAAATTTGTGACTGTCAAGAATCTGGATGTCA
TCAAAAAGGAGAACTACTATGAAGTGAATAGCAAGTGCTACGAAGAGGCT
AAAAAGCTGAAAAAGATTAGCAACCAGGCAGAGTTCATCGCCTCCTTTTA
CAACAACGACCTGATTAAGATCAATGGCGAACTGTATAGGGTCATCGGGG
TGAACAATGATCTGCTGAACCGCATTGAAGTGAATATGATTGACATCACT
TACCGAGAGTATCTGGAAAACATGAATGATAAGCGCCCCCCTCGAATTAT
CAAAACAATTGCCTCTAAGACTCAGAGTATCAAAAAGTACTCAACCGACA
TTCTGGGAAACCTGTATGAGGTGAAGAGCAAAAAGCACCCTCAGATTATC
AAAAAGGGC

[1041] If any of the above Cas9 sequences are fused with a peptide or polypeptide at the C-terminus, it is understood that the stop codon will be removed.

[1042] Other Cas Molecules and Cas Polypeptides

[1043] Various types of Cas molecules or Cas polypeptides can be used to practice the inventions disclosed herein. In some embodiments, Cas molecules of Type II Cas systems are used. In other embodiments, Cas molecules of other Cas systems are used. For example, Type I or Type III Cas molecules may be used. Exemplary Cas molecules (and Cas systems) are described, e.g., in Haft et al., PLOS COMPUTATIONAL BIOLOGY 2005, 1(6): e60 and Makarova et al., NATURE REVIEW MICROBIOLOGY 2011, 9:467-477, the contents of both references are incorporated herein by reference in their entirety. Exemplary Cas molecules (and Cas systems) are also shown in Table 12.

TABLE 12
Cas Systems

| | | | Structure of | Families (and | |
|---|---|---|---|---|---|
| Gene | System type | Name from | encoded protein | superfamily) of | |
| name^{‡} | or subtype | Haft et al.^{§} | (PDB accessions)^{¶} | encoded protein^{#}** | Representatives |
| cas1 | Type I | cas1 | 3GOD, 3LFX | COG1518 | SERP2463, SPy1047 |
| | Type II | | and 2YZS | | and ygbT |
| | Type III | | | | |
| cas2 | Type I | cas2 | 2IVY, 2I8E and | COG1343 and | SERP2462, SPy1048, |
| | Type II | | 3EXC | COG3512 | SPy1723 (N-terminal |
| | Type III | | | | domain) and ygbF |
| cas3′ | Type I^{‡‡} | cas3 | NA | COG1203 | APE1232 and ygcB |
| cas3″ | Subtype I-A | NA | NA | COG2254 | APE1231 and BH0336 |
| | Subtype I-B | | | | |
| cas4 | Subtype I-A | cas4 and csa1 | NA | COG1468 | APE1239 and BH0340 |
| | Subtype I-B | | | | |
| | Subtype I-C | | | | |
| | Subtype I-D | | | | |
| | Subtype II-B | | | | |
| cas5 | Subtype I-A | cas5a, cas5d, | 3KG4 | COG1688 | APE1234, BH0337, |
| | Subtype I-B | cas5e, cas5h, | | (RAMP) | devS and ygcI |
| | Subtype I-C | cas5p, cas5t | | | |
| | Subtype I-E | and cmx5 | | | |
| cas6 | Subtype I-A | cas6 and cmx6 | 3I4H | COG1583 and | PF1131 and slr7014 |
| | Subtype I-B | | | COG5551 | |
| | Subtype I-D | | | (RAMP) | |
| | Subtype III-A | | | | |
| | Subtype III-B | | | | |
| cas6e | Subtype I-E | cse3 | 1WJ9 | (RAMP) | ygcH |
| cas6f | Subtype I-F | csy4 | 2XLJ | (RAMP) | y1727 |
| cas7 | Subtype I-A | csa2, csd2, | NA | COG1857 and | devR and ygcJ |
| | Subtype I-B | cse4, csh2, | | COG3649 | |
| | Subtype I-C | csp1 and cst2 | | (RAMP) | |
| | Subtype I-E | | | | |
| cas8a1 | Subtype I-A^{‡‡} | cmx1, cst1, | NA | BH0338-like | LA3191^{§§} and |
| | | csx8, csx13 | | | PG2018^{§§} |
| | | and CXXC- | | | |
| | | CXXC | | | |
| cas8a2 | Subtype I-A^{‡‡} | csa4 and csx9 | NA | PH0918 | AF0070, AF1873, |
| | | | | | MJ0385, PF0637, |
| | | | | | PH0918 and SSO1401 |
| cas8b | Subtype I-B^{‡‡} | csh1 and | NA | BH0338-like | MTH1090 and |
| | | TM1802 | | | TM1802 |
| cas8c | Subtype I-C^{‡‡} | csd1 and csp2 | NA | BH0338-like | BH0338 |
| cas9 | Type II^{‡‡} | csn1 and csx12 | NA | COG3513 | FTN_0757 and |
| | | | | | SPy1046 |
| cas10 | Type III^{‡‡} | cmr2, csm1 | NA | COG1353 | MTH326, Rv2823c^{§§} |
| | | and csx11 | | | and TM1794^{§§} |
| cas10d | Subtype I-D^{‡‡} | csc3 | NA | COG1353 | slr7011 |
| csy1 | Subtype I-F^{‡‡} | csy1 | NA | y1724-like | y1724 |
| csy2 | Subtype I-F | csy2 | NA | (RAMP) | y1725 |
| csy3 | Subtype I-F | csy3 | NA | (RAMP) | y1726 |
| cse1 | Subtype I-E^{‡‡} | cse1 | NA | YgcL-like | ygcL |
| cse2 | Subtype I-E | cse2 | 2ZCA | YgcK-like | ygcK |
| csc1 | Subtype I-D | csc1 | NA | alr1563-like | alr1563 |
| | | | | (RAMP) | |
| csc2 | Subtype I-D | csc1 and csc2 | NA | COG1337 | slr7012 |
| | | | | (RAMP) | |
| csa5 | Subtype I-A | csa5 | NA | AF1870 | AF1870, MJ0380, |
| | | | | | PF0643 and SSO1398 |
| csn2 | Subtype II-A | csn2 | NA | SPy1049-like | SPy1049 |
| csm2 | Subtype III-A^{‡‡} | csm2 | NA | COG1421 | MTH1081 and |
| | | | | | SERP2460 |
| csm3 | Subtype III-A | csc2 and csm3 | NA | COG1337 | MTH1080 and |
| | | | | (RAMP) | SERP2459 |
| csm4 | Subtype III-A | csm4 | NA | COG1567 | MTH1079 and |
| | | | | (RAMP) | SERP2458 |
| csm5 | Subtype III-A | csm5 | NA | COG1332 | MTH1078 and |
| | | | | (RAMP) | SERP2457 |
| csm6 | Subtype III-A | APE2256 and | 2WTE | COG1517 | APE2256 and |
| | | csm6 | | | SSO1445 |
| cmr1 | Subtype III-B | cmr1 | NA | COG1367 | PF1130 |
| | | | | (RAMP) | |
| cmr3 | Subtype III-B | cmr3 | NA | COG1769 | PF1128 |
| | | | | (RAMP) | |
| cmr4 | Subtype III-B | cmr4 | NA | COG1336 | PF1126 |
| | | | | (RAMP) | |
| cmr5 | Subtype III-B^{‡‡} | cmr5 | 2ZOP and 2OEB | COG3337 | MTH324 and PF1125 |
| cmr6 | Subtype III-B | cmr6 | NA | COG1604 | PF1124 |
| | | | | (RAMP) | |
| csb1 | Subtype I-U | GSU0053 | NA | (RAMP) | Balac_1306 and |
| | | | | | GSU0053 |
| csb2 | Subtype I-U^{§§} | NA | NA | (RAMP) | Balac_1305 and |
| | | | | | GSU0054 |
| csb3 | Subtype I-U | NA | NA | (RAMP) | Balac_1303^{§§} |
| csx17 | Subtype I-U | NA | NA | NA | Btus_2683 |
| csx14 | Subtype I-U | NA | NA | NA | GSU0052 |
| csx10 | Subtype I-U | csx10 | NA | (RAMP) | Caur_2274 |
| csx16 | Subtype III-U | VVA1548 | NA | NA | VVA1548 |
| csaX | Subtype III-U | csaX | NA | NA | SSO1438 |
| csx3 | Subtype III-U | csx3 | NA | NA | AF1864 |
| csx1 | Subtype III-U | csa3, csx1, | 1XMX and 2I71 | COG1517 and | MJ1666, NE0113, |
| | | csx2, DXTHG, | | COG4006 | PF1127 and TM1812 |
| | | NE0113 and | | | |
| | | TIGR02710 | | | |
| csx15 | Unknown | NA | NA | TTE2665 | TTE2665 |
| csf1 | Type U | csf1 | NA | NA | AFE_1038 |
| csf2 | Type U | csf2 | NA | (RAMP) | AFE_1039 |
| csf3 | Type U | csf3 | NA | (RAMP) | AFE_1040 |
| csf4 | Type U | csf4 | NA | NA | AFE_1037 |

### IV. Functional Analysis of Candidate Molecules

[1044] Candidate Cas9 molecules, candidate gRNA molecules, candidate Cas9 molecule/gRNA molecule complexes, can be evaluated by art-known methods or as described herein. For example, exemplary methods for evaluating the endonuclease activity of Cas9 molecule are described, e.g., in Jinek et al., SCIENCE 2012, 337(6096):816-821.

[1045] Binding and Cleavage Assay: Testing the Endonuclease Activity of Cas9 Molecule

[1046] The ability of a Cas9 molecule/gRNA molecule complex to bind to and cleave a target nucleic acid can be evaluated in a plasmid cleavage assay. In this assay, synthetic or in vitro-transcribed gRNA molecule is pre-annealed prior to the reaction by heating to 95° C. and slowly cooling down to room temperature. Native or restriction digest-linearized plasmid DNA (300 ng (˜8 nM)) is incubated for 60 min at 37° C. with purified Cas9 protein molecule (50-500 nM) and gRNA (50-500 nM, 1:1) in a Cas9 plasmid cleavage buffer (20 mM HEPES pH 7.5, 150 mM KCl, 0.5 mM DTT, 0.1 mM EDTA) with or without 10 mM MgCl₂. The reactions are stopped with 5× DNA loading buffer (30% glycerol, 1.2% SDS, 250 mM EDTA), resolved by a 0.8 or 1% agarose gel electrophoresis and visualized by ethidium bromide staining. The resulting cleavage products indicate whether the Cas9 molecule cleaves both DNA strands, or only one of the two strands. For example, linear DNA products indicate the cleavage of both DNA strands. Nicked open circular products indicate that only one of the two strands is cleaved.

[1047] Alternatively, the ability of a Cas9 molecule/gRNA molecule complex to bind to and cleave a target nucleic acid can be evaluated in an oligonucleotide DNA cleavage assay. In this assay, DNA oligonucleotides (10 pmol) are radiolabeled by incubating with 5 units T4 polynucleotide kinase and ˜3-6 pmol (˜20-40 mCi) [γ-32P]-ATP in 1× T4 polynucleotide kinase reaction buffer at 37° C. for 30 min, in a 50 μL reaction. After heat inactivation (65° C. for 20 min), reactions are purified through a column to remove unincorporated label. Duplex substrates (100 nM) are generated by annealing labeled oligonucleotides with equimolar amounts of unlabeled complementary oligonucleotide at 95° C. for 3 min, followed by slow cooling to room temperature. For cleavage assays, gRNA molecules are annealed by heating to 95° C. for 30 s, followed by slow cooling to room temperature. Cas9 (500 nM final concentration) is pre-incubated with the annealed gRNA molecules (500 nM) in cleavage assay buffer (20 mM HEPES pH 7.5, 100 mM KCl, 5 mM MgCl2, 1 mM DTT, 5% glycerol) in a total volume of 9 μl. Reactions are initiated by the addition of 1 μl target DNA (10 nM) and incubated for 1 h at 37° C. Reactions are quenched by the addition of 20 μl of loading dye (5 mM EDTA, 0.025% SDS, 5% glycerol in formamide) and heated to 95° C. for 5 min. Cleavage products are resolved on 12% denaturing polyacrylamide gels containing 7 M urea and visualized by phosphorimaging. The resulting cleavage products indicate that whether the complementary strand, the non-complementary strand, or both, are cleaved.

[1048] One or both of these assays can be used to evaluate the suitability of a candidate gRNA molecule or candidate Cas9 molecule.

[1049] Binding Assay: Testing the Binding of Cas9 Molecule to Target DNA

[1050] Exemplary methods for evaluating the binding of Cas9 molecule to target DNA are described, e.g., in Jinek et al., SCIENCE 2012; 337(6096):816-821.

[1051] For example, in an electrophoretic mobility shift assay, target DNA duplexes are formed by mixing of each strand (10 nmol) in deionized water, heating to 95° C. for 3 min and slow cooling to room temperature. All DNAs are purified on 8% native gels containing 1X TBE. DNA bands are visualized by UV shadowing, excised, and eluted by soaking gel pieces in DEPC-treated H₂O. Eluted DNA is ethanol precipitated and dissolved in DEPC-treated H₂O. DNA samples are 5′ end labeled with [γ-32P]-ATP using T4 polynucleotide kinase for 30 min at 37° C. Polynucleotide kinase is heat denatured at 65° C. for 20 min, and unincorporated radiolabel is removed using a column. Binding assays are performed in buffer containing 20 mM HEPES pH 7.5, 100 mM KCl, 5 mM MgCl₂, 1 mM DTT and 10% glycerol in a total volume of 10 μl. Cas9 protein molecule is programmed with equimolar amounts of pre-annealed gRNA molecule and titrated from 100 pM to 1 μM. Radiolabeled DNA is added to a final concentration of 20 pM. Samples are incubated for 1 h at 37° C. and resolved at 4° C. on an 8% native polyacrylamide gel containing 1× TBE and 5 mM MgCl₂. Gels are dried and DNA visualized by phosphorimaging.

[1052] Differential Scanning Flourimetry (DSF)

[1053] The thermostability of Cas9-gRNA ribonucleoprotein (RNP) complexes can be measured via DSF. This technique measures the thermostability of a protein, which can increase under favorable conditions such as the addition of a binding RNA molecule, e.g., a gRNA.

[1054] The assay is performed using two different protocols, one to test the best stoichiometric ratio of gRNA:Cas9 protein and another to determine the best solution conditions for RNP formation.

[1055] To determine the best solution to form RNP complexes, a 2 uM solution of Cas9 in water+10× SYPRO Orange® (Life Techonologies cat#S-6650) and dispensed into a 384 well plate. An equimolar amount of gRNA diluted in solutions with varied pH and salt is then added. After incubating at room temperature for 10′ and brief centrifugation to remove any bubbles,a Bio-Rad CFX384™ Real-Time System C1000 Touch™ Thermal Cycler with the Bio-Rad CFX Manager software is used to run a gradient from 20° C. to 90° C. with a 1° increase in temperature every 10 seconds.

[1056] The second assay consists of mixing various concentrations of gRNA with 2uM Cas9 in optimal buffer from assay 1 above and incubating at RT for 10′ in a 384 well plate. An equal volume of optimal buffer +10× SYPRO Orange® (Life Techonologies cat#S-6650) is added and the plate sealed with Microseal® B adhesive (MSB-1001). Following brief centrifugation to remove any bubbles, a Bio-Rad CFX384™ Real-Time System C1000 Touch™ Thermal Cycler with the Bio-Rad CFX Manager software is used to run a gradient from 20° C. to 90° C. with a 1° increase in temperature every 10 seconds.

### V. Genome Editing Approaches

[1057] Mutations in the USH2A gene may be corrected using one of the approaches discussed herein. In an embodiment, a mutation in the USH2A gene is corrected by homology directed repair (HDR) using an exogenously provided template nucleic acid (see Section V.1).

[1058] V.1 HDR Repair and Template Nucleic Acids

[1059] The donor template or template nucleic acid provides for alteration of the target sequence. While not wishing to be bound by theory, it is believed that alteration of the target sequence occurs by homology-directed repair (HDR) with the donor template. While not wishing to be bound by theory, it is believed that plasmid donors serve as templates for homologous recombination and it is believed that single stranded donor templates provide for alteration of the target sequence potentially by alternate methods of homology directed repair (e.g., single strand annealing) between the target sequence and the donor template. Donor template-effected alteration of a target sequence depends on cleavage by a Cas9 molecule. Cleavage by Cas9 can comprise a double strand break or two single strand breaks.

[1060] Double Strand Break Mediated Correction

[1061] In an embodiment, double strand cleavage is effected by a Cas9 molecule having cleavage activity associated with an HNH-like domain and cleavage activity associated with an RuvC-like domain, e.g., an N-terminal RuvC-like domain, e.g., a wildtype Cas9. Such embodiments require only a single gRNA.

[1062] Single Strand Break Mediated Correction

[1063] In other embodiments, two single strand breaks, or nicks, are effected by a Cas9 molecule having nickase activity, e.g., cleavage activity associated with an HNH-like domain or cleavage activity associated with an N-terminal RuvC-like domain. Such embodiments require two gRNAs, one for placement of each single strand break. In an embodiment, the Cas9 molecule having nickase activity cleaves the strand to which the gRNA hybridizes but not the strand that is complementary to the strand to which the gRNA hybridizes. In an embodiment, the Cas9 molecule having nickase activity does not cleave the strand to which the gRNA hybridizes but rather cleaves the strand that is complementary to the strand to which the gRNA hybridizes.

[1064] In an embodiment, the nickase has HNH activity, e.g., a Cas9 molecule having the RuvC activity inactivated, e.g., a Cas9 molecule having a mutation at D10, e.g., the D10A mutation. D10A inactivates RuvC therefore the Cas9 nickase has (only) HNH activity and will cut on the strand to which the gRNA hybridizes (the complementary strand, which does not have the NGG PAM on it). In other embodiments, a Cas9 molecule having an H840, e.g., an H840A, mutation can be used as a nickase. H840A inactivates HNH therefore the Cas9 nickase has (only) RuvC activity and cuts on the non-complementary strand (the strand that has the NGG PAM and whose sequence is identical to the gRNA). In other embodiments, a Cas9 molecule having an H863, e.g., an H863A, mutation can be used as a nickase. H863A inactivates HNH therefore the Cas9 nickase has (only) RuvC activity and cuts on the non-complementary strand (the strand that has the NGG PAM and whose sequence is identical to the gRNA).

[1065] In an embodiment, in which a nickase and two gRNAs are used to position two single strand nicks, one nick is on the + strand and one nick is on the − strand of the target nuclic acid. The PAMs can be outwardly facing. The gRNAs can be selected such that the gRNAs are separated by, from 0-50, 0-100, or 0-200 nucleotides. In an embodiment, there is no overlap between the target sequences that are complementary to the targeting domains of the two gRNAs. In an embodiment, the gRNAs do not overlap and are separated by as much as 50, 100, or 200 nucleotides. In an embodiment, the use of two gRNAs can increase specificity, e.g., by decreasing off-target binding (Ran et. al., Cell 2013; 154(6):1380-1389).

[1066] In an embodiment, a single nick can be used to induce HDR. In an embodiment, using a single nick to induce HDR is less efficient and has a lower on-target activity than is seen with a double nickase approach.

[1067] Placement of Double Strand or Single Strand Breaks Relative to the Target Position

[1068] The double strand break or single strand break in one of the strands should be sufficiently close to the target sequence or signature such that correction occurs. In an embodiment, the distance is not more than 50, 100, 200, 300, 350 or 400 nucleotides. While not wishing to be bound by theory, it is believed that the break should be sufficiently close to the target sequence such that the break is within the region that is subject to exonuclease-mediated removal during end resection. If the distance between the target sequence and a break is too great, the mutation may not be included in the end resection and, therefore, may not be corrected, as donor sequence may only be used to correct sequence within the end resection region.

[1069] In an embodiment, a gRNA, e.g., a unimolecular (or chimeric) or modular gRNA molecule, is configured to position one double-strand break in close proximity to a nucleotide of the target position. In an embodiment, the cleavage site is between 0-40 by away from the target position (e.g., less than 40, 35, 30, 25, 20, 15, 10, 9, 8, 7, 6, 5, 4, 3, 2 or 1 by from the target position).

[1070] In an embodiment, two gRNAs, e.g., independently, unimolecular (or chimeric) or modular gRNA, are configured to position two single-strand breaks. In an embodiment, the gRNAs are configured to position cuts at the same position, or within a few nucleotides of one another, on different strands, essentially mimicking a double strand break. In an embodiment, the two nicks are between 0-40 bp away from the target position (e.g., less than 40, 35, 30, 25, 20, 15, 10, 9, 8, 7, 6, 5, 4, 3, 2 or 1 bp from the target position) respectively, and the two single strand breaks are within 25-55 bp of each other (e.g., between 25 to 50, 25 to 45, 25 to 40, 25 to 35, 25 to 30, 50 to 55, 45 to 55, 40 to 55, 35 to 55, 30 to 55, 30 to 50, 35 to 50, 40 to 50, 45 to 50, 35 to 45, or 40 to 45 bp) and no more than 100 bp away from each other (e.g., no more than 90, 80, 70, 60, 50, 40, 30, 20 or 10 bp). In an embodiment, the gRNAs are configured to place a single strand break on either side of the target position. In an embodiment, the gRNAs are configured to place a single strand break on the same side (either 5′ or 3′) of the target position.

[1071] Regardless of whether a break is a double strand or a single strand break, the gRNA should be configured to avoid unwanted target chromosome elements, such as repeated elements, e.g., an Alu repeat, in the target domain. In addition, a break, whether a double strand or a single strand break, should be sufficiently distant from any sequence that should not be altered. For example, cleavage sites positioned within introns should be sufficiently distant from any intron/exon border, or naturally occurring splice signal, to avoid alteration of the exonic sequence or unwanted splicing events.

[1072] Length of the Homology Arms

[1073] The homology arm should extend at least as far as the region in which end resection may occur, e.g., in order to allow the resected single stranded overhang to find a complementary region within the donor template. The overall length could be limited by parameters such as plasmid size or viral packaging limits. In an embodiment, a homology arm does not extend into repeated elements, e.g., Alu repeats.

[1074] Exemplary homology arm lengths include a least 50, 100, 250, 500, 750 or 1000 nucleotides.

[1075] Target position, as used herein, refers to a site on a target nucleic acid (e.g., the chromosome) that is modified by a Cas9 molecule-dependent process. For example, the target position can be a modified Cas9 molecule cleavage of the target nucleic acid and template nucleic acid directed modification, e.g., correction, of the target position. In an embodiment, a target position can be a site between two nucleotides, e.g., adjacent nucleotides, on the target nucleic acid into which one or more nucleotides is added. The target position may comprise one or more nucleotides that are altered, e.g., corrected, by a template nucleic acid. In an embodiment, the target position is within a target sequence (e.g., the sequence to which the gRNA binds). In an embodiment, a target position is upstream or down stream of a target sequence (e.g., the sequence to which the gRNA binds).

[1076] A template nucleic acid, as that term is used herein, refers to a nucleic acid sequence which can be used in conjunction with a Cas9 molecule and a gRNA molecule to alter the structure of a target position. In an embodiment, the target nucleic acid is modified to have the some or all of the sequence of the template nucleic acid, typically at or near cleavage site(s). Target position, as used herein, refers to a nucleotide or nucleotides that are altered by the template nucleic acid, e.g., by altering, e.g., by recombination, e.g., homologous recombination or by homology directed repair. In an embodiment, the template nucleic acid is single stranded. In an alternate embodiment, the template nucleic acid is double stranded. In an embodiment, the template nucleic acid is DNA, e.g., double stranded DNA. In an alternate embodiment, the template nucleic acid is singe stranded DNA. In an embodiment, the template nucleic acid is encoded on the same vector backbone, e.g. AAV genome, plasmid DNA, as the Cas9 and gRNA. In an embodiment, the template nucleic is excised from this backbone in vivo, e.g. is flanked by gRNA recognition sequences.

[1077] In an embodiment, the template nucleic acid alters the structure of the target position by participating in a homology directed repair event. In an embodiment, the template nucleic acid alters the sequence of the target position. In an embodiment, the template nucleic acid results in the incorporation of a modified, or non-naturally occurring base into the target nucleic acid.

[1078] Typically, the template sequence undergoes a breakage mediated or catalyzed recombination with the target sequence. In an embodiment, the template nucleic acid includes sequence that corresponds to a site on the target sequence that is cleaved by an eaCas9 mediated cleavage event. In an embodiment, the template nucleic acid includes sequence that corresponds to both, a first site on the target sequence that is cleaved in a first Cas9 mediated event, and a second site on the target sequence that is cleaved in a second Cas9 mediated event.

[1079] In an embodiment, the template nucleic acid can include sequence which results in an alteration in the coding sequence of a translated sequence, e.g., one which results in the substitution of one amino acid for another in a protein product, e.g., transforming a mutant allele into a wild type allele, transforming a wild type allele into a mutant allele, and/or introducing a stop codon, insertion of an amino acid residue, deletion of an amino acid residue, or a nonsense mutation.

[1080] In other embodiments, the template nucleic acid can include sequence which results in an alteration in a non-coding sequence, e.g., an alteration in an exon or in a 5′ or 3′ non-translated or non-transcribed region. Such alterations include an alteration in a control element, e.g., a promoter, enhancer, and an alteration in a cis-acting or trans-acting control element.

[1081] A template nucleic acid having homology with a target position in the USH2A gene from can be used to alter the structure of a target sequence. The template sequence can be used to alter an unwanted structure, e.g., an unwanted or mutant nucleotide.

[1082] A template nucleic acid comprises the following components:

[1083] [5′ homology arm]-[replacement sequence]-[3′ homology arm].

[1084] The homology arms provide for recombination into the chromosome, thus replacing the undesired element, e.g., a mutation or signature, with the replacement sequence. In an embodiment, the homology arms flank the most distal cleavage sites.

[1085] In an embodiment, the 3′ end of the 5′ homology arm is the position next to the 5′ end of the replacement sequence. In an embodiment, the 5′ homology arm can extend at least 10, 20, 30, 40, 50, 100, 200, 300, 400, 500, 600, 700, 800, 900, 1000, 1500, or 2000 nucleotides 5′ from the 5′ end of the replacement sequence.

[1086] In an embodiment, the 5′ end of the 3′ homology arm is the position next to the 3′ end of the replacement sequence. In an embodiment, the 3′ homology arm can extend at least 10, 20, 30, 40, 50, 100, 200, 300, 400, 500, 600, 700, 800, 900, 1000, 1500, or 2000 nucleotides 3′ from the 3′ end of the replacement sequence.

[1087] Exemplary Template Nucleic Acids

[1088] Exemplary template nucleic acids (also referred to herein as donor constructs) to correction a mutation, e.g., a deletion of guanine at nucleotide position 2299 (2299delG) in the USH2A gene, are provided.

[1089] Suitable sequence for the 5′ homology arm can be selected from (e.g., includes a portion of) or include the following sequence:

(5′H arm for 2299delG correction)

(SEQ ID NO: 387)

AAAACATTTTTCTTCATTCGTAAAATGTATATGTGTACTCCTTTAAATAG
AAGTAATATAAAAAACAGAATTTACTTAGTGTTTAAAGAGGTATGTTCTG
AGTCACACAAGATGACAAGCAATGTGATTGCTTTATGAGCCAAGGAGAGC
ATGATTTATATTAATTGAAAATGATAAAATAGAGGAGCATACAAAAGGAT
TAAACCAAAAATTGCCCTGGATAAGTTTTATTTATATTAATTACTTAAAT
GTGTGGATTCAGAAATAAGTGTATATGCTGTTTTCACAAAAATAGTTATC
AGCTGACATTTTTTTCTTTTTTCCCAGCTTCACGAAGGTATAATTAAATA
AAAATTGTATATATTTATGGCAGACAACATGATGTTTTGATATATGTACA
CATTATAAAATGATTAATTCCAGCTAATTAATGTATCCATCACCTCATGT
ACTTATCATGTTTTTGGGGTGAGAACATTTAAGATCTAATCTCTTAGCAA
TTTTCAAGTATACAATACATTATTATTAAGTATAGTCACCATGCTGTACA
ATAGAGCTCCAGAACTTATTCATTCTGTCTAGCTGAAACTTTGTACTCAG
CTTAACCTTTTATTAAACATCTTTAGAGATTTCTTATCTTTAGAAAAACA
ACTAATTTGTTATATGTAATTCTACTATAATTTTAAATGAGCACATTTGT
TAAAATAGTTTTTAAGATTTGTTAAAGAGAAAAAGAGCTCCAGCATATGT
AACAGAAACAACATTTGCATTAAGCATTTTTCTTTGCATTAAGTAATAAT
TAAAAATTTATGAAGTTCATCGCAAACAGTTGTATATTAAAGCTAAATTA
AATATTGTCATTGAATTTTGAGAGTAAGATTGGCCCCCTATGGCATTGCT
TGTGAGAAAACACTCAATATTTTGTGTTCGTATCATCTGCAGTAGCATTG
TTTGTGTCTCGTCTATCTTGAATGAAATCATTTTCCCATCCTCACCTTTT
AAATATATTTTATCTTTAGGGCTTAGGTGTGATCATTGCAATTTTGGATT
TAAATTTCTCCGAAGCTTTAATGATGTTGGATGTGAGCCCTGCCAGTGTA
ACCTCCATGGCTCAGTGAACAAATTCTGCAATCCTCACTCTGGGCAGTGT

[1090] Suitable sequence for the 3′ homology arm can be selected from (e.g., includes a portion of) or include the following sequence:

(3′H arm for 2299delG correction)

(SEQ ID NO: 388)

AGTGCAAAAAAGAAGCCAAAGGACTTCAGTGTGACACCTGCAGAGAAAAC
TTTTATGGGTTAGATGTCACCAATTGTAAGGCCTGTGACTGTGACACAGC
TGGATCCCTCCCTGGGACTGTCTGTAATGCTAAGACAGGGCAGTGCATCT
GCAAGCCCAATGTTGAAGGGAGACAGTGCAATAAATGTTTGGAGGGAAAC
TTCTACCTACGGCAAAATAATTCTTTCCTCTGTCTGCCTTGCAACTGTGA
TAAGACTGGGACAATAAATGGCTCTCTGCTGTGTAACAAATCAACAGGAC
AATGTCCTTGCAAATTAGGGGTAACAGGTCTTCGCTGTAATCAGTGTGAG
CCTCACAGGTACAATTTGACCATTGACAATTTTCAACACTGCCAGATGTG
TGAGTGTGATTCCTTGGGGACATTACCTGGGACCATTTGTGACCCAATCA
GTGGCCAGTGCCTGTGTGTGCCTAATCGTCAAGGAAGAAGGTGTAATCAG
TGTCAACCAGGTAAGAAAGAAATGTATTACATTTTCAGTGCACAATGACA
TTCCTTTTGTTAACTTAGGTAACTTCTCCCTGTTTCTGGTTTGTGGCTTC
TACAAATTTTATTTCCAAAATCATTACTGTATTTATATCATTATCCAACA
CATATATAACTATTTAACTTATTCAAAATTATCTGCATATTTATGTTACT
ATTTTGAGAGGATACTTTAGATAAAACTCAGCCGATCGGATTTATTTCAT
AATTGAGACTCAATTTCTACACTTGAAGTAAATCTCCTTTTTAACAGTTT
TTTAAAAATCAGATCAACAAGAGTCAATTTTATTTTCCAGAGAAAGGAAA
ATTTGAGTTGAATATCCATACAATGCCAAATATTCAAATGATGAACTAAA
TCTCTGAATAAAGCTGGCTAAATGTTTTTGCTGAAGAGGCTATATGTTCT
AGTTTTATATAGAAATACCTAGAATTGTTTCCACATGCCATCAAATTAAT
AAAATAGGCCACTGTTTAATCTCATTATATACAAACTTATCTTTCCATCT
CTTTCCCAATTGGGAGAGGGATAGACCCCATCTATGGCTCTCCTTACATT
TAAGATTTTAACTAAAATACTATACCTTCTTTACAATAAATTCATTATGA

[1091] In an embodiment, the replacement sequence comprises or consists of a guanine (G) residue.

[1092] In an embodiment, to correct a deletion of guanine at nucleotide position 2299 (2299delG) in the USH2A gene, the homology arms, e.g., the 5′ and 3′ homology arms, may each comprise about 1000 base pairs (bp) of sequence flanking the most distal gRNAs (e.g., 1150 bp of sequence on either side of the mutation). The 5′ homology arm is shown as bold sequence, the inserted base to correct the guanine deletion is shown as non-bold and boxed sequence, and the 3′ homology arm is shown as underlined sequence.

(Template Construct 1; SEQ ID NO: 389)
AAAACATTTTTCTTCATTCGTAAAATGTATATGTGTACTCCTTTAAATAG
AAGTAATATAAAAAACAGAATTTACTTAGTGTTTAAAGAGGTATGTTCTG
AGTCACACAAGATGACAAGCAATGTGATTGCTTTATGAGCCAAGGAGAGC
ATGATTTATATTAATTGAAAATGATAAAATAGAGGAGCATACAAAAGGAT
TAAACCAAAAATTGCCCTGGATAAGTTTTATTTATATTAATTACTTAAAT
GTGTGGATTCAGAAATAAGTGTATATGCTGTTTTCACAAAAATAGTTATC
AGCTGACATTTTTTTCTTTTTTCCCAGCTTCACGAAGGTATAATTAAATA
AAAATTGTATATATTTATGGCAGACAACATGATGTTTTGATATATGTACA
CATTATAAAATGATTAATTCCAGCTAATTAATGTATCCATCACCTCATGT
ACTTATCATGTTTTTGGGGTGAGAACATTTAAGATCTAATCTCTTAGCAA
TTTTCAAGTATACAATACATTATTATTAAGTATAGTCACCATGCTGTACA
ATAGAGCTCCAGAACTTATTCATTCTGTCTAGCTGAAACTTTGTACTCAG
CTTAACCTTTTATTAAACATCTTTAGAGATTTCTTATCTTTAGAAAAACA
ACTAATTTGTTATATGTAATTCTACTATAATTTTAAATGAGCACATTTGT
TAAAATAGTTTTTAAGATTTGTTAAAGAGAAAAAGAGCTCCAGCATATGT
AACAGAAACAACATTTGCATTAAGCATTTTTCTTTGCATTAAGTAATAAT
TAAAAATTTATGAAGTTCATCGCAAACAGTTGTATATTAAAGCTAAATTA
AATATTGTCATTGAATTTTGAGAGTAAGATTGGCCCCCTATGGCATTGCT
TGTGAGAAAACACTCAATATTTTGTGTTCGTATCATCTGCAGTAGCATTG
TTTGTGTCTCGTCTATCTTGAATGAAATCATTTTCCCATCCTCACCTTTT
AAATATATTTTATCTTTAGGGCTTAGGTGTGATCATTGCAATTTTGGATT
TAAATTTCTCCGAAGCTTTAATGATGTTGGATGTGAGCCCTGCCAGTGTA
ACCTCCATGGCTCAGTGAACAAATTCTGCAATCCTCACTCTGGGCAGTGT

[chemical structure]

CTTTTATGGGTTAGATGTCACCAATTGTAAGGCCTGTGACTGTGACACAG
CTGGATCCCTCCCTGGGACTGTCTGTAATGCTAAGACAGGGCAGTGCATC
TGCAAGCCCAATGTTGAAGGGAGACAGTGCAATAAATGTTTGGAGGGAAA
CTTCTACCTACGGCAAAATAATTCTTTCCTCTGTCTGCCTTGCAACTGTG
ATAAGACTGGGACAATAAATGGCTCTCTGCTGTGTAACAAATCAACAGGA
CAATGTCCTTGCAAATTAGGGGTAACAGGTCTTCGCTGTAATCAGTGTGA
GCCTCACAGGTACAATTTGACCATTGACAATTTTCAACACTGCCAGATGT
GTGAGTGTGATTCCTTGGGGACATTACCTGGGACCATTTGTGACCCAATC
AGTGGCCAGTGCCTGTGTGTGCCTAATCGTCAAGGAAGAAGGTGTAATCA
GTGTCAACCAGGTAAGAAAGAAATGTATTACATTTTCAGTGCACAATGAC
ATTCCTTTTGTTAACTTAGGTAACTTCTCCCTGTTTCTGGTTTGTGGCTT
CTACAAATTTTATTTCCAAAATCATTACTGTATTTATATCATTATCCAAC
ACATATATAACTATTTAACTTATTCAAAATTATCTGCATATTTATGTTAC
TATTTTGAGAGGATACTTTAGATAAAACTCAGCCGATCGGATTTATTTCA
TAATTGAGACTCAATTTCTACACTTGAAGTAAATCTCCTTTTTAACAGTT
TTTTAAAAATCAGATCAACAAGAGTCAATTTTATTTTCCAGAGAAAGGAA
AATTTGAGTTGAATATCCATACAATGCCAAATATTCAAATGATGAACTAA
ATCTCTGAATAAAGCTGGCTAAATGTTTTTGCTGAAGAGGCTATATGTTC
TAGTTTTATATAGAAATACCTAGAATTGTTTCCACATGCCATCAAATTAA
TAAAATAGGCCACTGTTTAATCTCATTATATACAAACTTATCTTTCCATC
TCTTTCCCAATTGGGAGAGGGATAGACCCCATCTATGGCTCTCCTTACAT
TTAAGATTTTAACTAAAATACTATACCTTCTTTACAATAAATTCATTATG
A

[1093] As described below in Table 13, shorter homology arms, e.g., 5′ and/or 3′ homology arms may be used.

[1094] It is contemplated herein that one or both homology arms may be shortened to avoid including certain sequence repeat elements, e.g., Alu repeats, LINE elements. For example, a 5′ homology arm may be shortened to avoid a sequence repeat element. In other embodiments, a 3′ homology arm may be shortened to avoid a sequence repeat element. In some embodiments, both the 5′ and the 3′ homology arms may be shortened to avoid including certain sequence repeat elements.

[1095] In an embodiment, to correct a deletion of guanine at nucleotide position 2299 (2299delG) in the USH2A gene (i.e., insert the missing guanine at position 2299), the 5′ homology arm may be shortened less than 600 nucleotides, e.g., approximately 550 nucleotides, i.g., 552 nucleotides, to avoid inclusion of a LINE repeat element in the 5′ homology arm. An exemplary 5′ homology arm is shown as bold sequence, the inserted base to correct the guanine deletion is shown as non-bold and boxed sequence, and an exemplary 3′ homology arm is shown as underlined sequence.

(Template Construct 2; SEQ ID NO: 390)
AGCTTAACCTTTTATTAAACATCTTTAGAGATTTCTTATCTTTAGAAAAA
CAACTAATTTGTTATATGTAATTCTACTATAATTTTAAATGAGCACATTT
GTTAAAATAGTTTTTAAGATTTGTTAAAGAGAAAAAGAGCTCCAGCATAT
GTAACAGAAACAACATTTGCATTAAGCATTTTTCTTTGCATTAAGTAATA
ATTAAAAATTTATGAAGTTCATCGCAAACAGTTGTATATTAAAGCTAAAT
TAAATATTGTCATTGAATTTTGAGAGTAAGATTGGCCCCCTATGGCATTG
CTTGTGAGAAAACACTCAATATTTTGTGTTCGTATCATCTGCAGTAGCAT
TGTTTGTGTCTCGTCTATCTTGAATGAAATCATTTTCCCATCCTCACCTT
TTAAATATATTTTATCTTTAGGGCTTAGGTGTGATCATTGCAATTTTGGA
TTTAAATTTCTCCGAAGCTTTAATGATGTTGGATGTGAGCCCTGCCAGTG
TAACCTCCATGGCTCAGTGAACAAATTCTGCAATCCTCACTCTGGGCAGT

[chemical structure]

AACTTTTATGGGTTAGATGTCACCAATTGTAAGGCCTGTGACTGTGACAC
AGCTGGATCCCTCCCTGGGACTGTCTGTAATGCTAAGACAGGGCAGTGCA
TCTGCAAGCCCAATGTTGAAGGGAGACAGTGCAATAAATGTTTGGAGGGA
AACTTCTACCTACGGCAAAATAATTCTTTCCTCTGTCTGCCTTGCAACTG
TGATAAGACTGGGACAATAAATGGCTCTCTGCTGTGTAACAAATCAACAG
GACAATGTCCTTGCAAATTAGGGGTAACAGGTCTTCGCTGTAATCAGTGT
GAGCCTCACAGGTACAATTTGACCATTGACAATTTTCAACACTGCCAGAT
GTGTGAGTGTGATTCCTTGGGGACATTACCTGGGACCATTTGTGACCCAA
TCAGTGGCCAGTGCCTGTGTGTGCCTAATCGTCAAGGAAGAAGGTGTAAT
CAGTGTCAACCAGGTAAGAAAGAAATGTATTACATTTTCAGTGCACAATG
ACATTCCTTTTGTTAACTTAGGTAACTTCTCCCTGTTTCTGGTTTGTGGC
TTCTACAAATTTTATTTCCAAAATCATTACTGTATTTATATCATTATCCA
ACACATATATAACTATTTAACTTATTCAAAATTATCTGCATATTTATGTT
ACTATTTTGAGAGGATACTTTAGATAAAACTCAGCCGATCGGATTTATTT
CATAATTGAGACTCAATTTCTACACTTGAAGTAAATCTCCTTTTTAACAG
TTTTTTAAAAATCAGATCAACAAGAGTCAATTTTATTTTCCAGAGAAAGG
AAAATTTGAGTTGAATATCCATACAATGCCAAATATTCAAATGATGAACT
AAATCTCTGAATAAAGCTGGCTAAATGTTTTTGCTGAAGAGGCTATATGT
TCTAGTTTTATATAGAAATACCTAGAATTGTTTCCACATGCCATCAAATT
AATAAAATAGGCCACTGTTTAATCTCATTATATACAAACTTATCTTTCCA
TCTCTTTCCCAATTGGGAGAGGGATAGACCCCATCTATGGCTCTCCTTAC
ATTTAAGATTTTAACTAAAATACTATACCTTCTTTACAATAAATTCATTA
TGA

[1096] It is contemplated herein that, in an embodiment, template nucleic acids for correcting a mutation may designed for use as a single-stranded oligonucleotide (ssODN). When using a ssODN, 5′ and 3′ homology arms may range up to about 200 base pairs (bp) in length, e.g., at least 25, 50, 75, 100, 125, 150, 175, or 200 by in length. Longer homology arms are also contemplated for ssODNs as improvements in oligonucleotide synthesis continue to be made.

[1097] In an embodiment, an ssODN may be used to correct a deletion of guanine at nucleotide position 2299 (2299delG) in the USH2A gene (i.e., insert the missing guanine at position 2299). For example, the ssODN may include 50 by 5′ and 3′ homology arms as shown below. The 5′ homology arm is shown as bold sequence, the inserted base to correct the guanine deletion is shown as non-bold and boxed sequence, and the 3′ homology arm is shown as underlined sequence.

(Template Construct 3; SEQ ID NO: 391)
ACCTCCATGGCTCAGTGAACAAATTCTGCAATCCTCACTCTGGGCAGTGT

[chemical structure]

C

[1098] The table below provides exemplary template nucleotides. In an embodiment, the template nucleotide includes the 5′ homology arm and the 3′ homology arm of a row from this Table 13. In other embodiments, a 5′ homology arm from the first column can be combined with a 3′ homology arm from this Table. In each embodiment, the combination of the 5′ and 3′ homology arms include the replacement sequence, a guanine residue to correct the guanine deletion at position 2299 of USH2A.

[1099] It is contemplated herein that, in an embodiment, Cas9 could potentially cleave donor constructs either prior to or following homology directed repair (e.g., homologous recombination), resulting in a possible non-homologous-end-joining event and further DNA sequence mutation at the chromosomal locus of interest. Therefore, to avoid cleavage of the donor sequence before and/or after Cas9-mediated homology directed repair, alternate versions of the donor sequence may be used where silent mutations are introduced. These silent mutations may disrupt Cas9 binding and cleavage, but not disrupt the amino acid sequence of the repaired gene. For example, mutations may include those made to a donor sequence to repair the USH2A gene, the mutant form which can cause Usher Syndrome. If gRNA USH2A-179 with the 20-base target sequence GTTAGATGTCACCAATTGTA is used with a donor construct to correct the 2299G deletion and the donor construct contains the sequence ACTTTTATGGGTTAGATGTCACCAATTGTAAGGCCTGTGACTG, the donor sequence may be changed to ACTTTTATGGGTTAGATGTCACCAATTGTAAAGCCTGTGACTG, where the bold A has been changed from a G at that position so that codon 793 still codes for the amino acid lysine, but the PAM sequence AGG has been modified to AAG to reduce or eliminate Cas9 cleavage at that locus.

TABLE 13

| | | |
|---|---|---|
| 5′ homology arm (the | | 3′ homology arm (the |
| number of nucleotides from | Replace- | number of nucleotides from |
| SEQ ID NO: 5′H, beginning | ment Se- | SEQ ID NO: 3′H, beginning |
| at the 3′ end of SEQ ID | quence = | at the 5′ end of SEQ ID |
| NO: 5′H) | G | NO: 3′H) |

| | |
|---|---|
| 10 or more | 10 or more |
| 20 or more | 20 or more |
| 50 or more | 50 or more |
| 100 or more | 100 or more |
| 150 or more | 150 or more |
| 200 or more | 200 or more |
| 250 or more | 250 or more |
| 300 or more | 300 or more |
| 350 or more | 350 or more |
| 400 or more | 400 or more |
| 450 or more | 450 or more |
| 500 or more | 500 or more |
| 550 or more | 550 or more |
| 600 or more | 600 or more |
| 650 or more | 650 or more |
| 700 or more | 700 or more |
| 750 or more | 750 or more |
| 800 or more | 800 or more |
| 850 or more | 850 or more |
| 900 or more | 900 or more |
| 1000 or more | 1000 or more |
| 1100 or more | 1100 or more |
| 1200 or more | 1200 or more |
| 1300 or more | 1300 or more |
| 1400 or more | 1400 or more |
| 1500 or more | 1500 or more |
| 1600 or more | 1600 or more |
| 1700 or more | 1700 or more |
| 1800 or more | 1800 or more |
| 1900 or more | 1900 or more |
| 1200 or more | 1200 or more |
| At least 50 but not long | At least 50 but not long |
| enough to include a | enough to include a |
| repeated element. | repeated element. |
| At least 100 but not long | At least 100 but not long |
| enough to include a | enough to include a |
| repeated element. | repeated element. |
| At least 150 but not long | At least 150 but not long |
| enough to include a | enough to include a |
| repeated element. | repeated element. |
| 5 to 100 nucleotides | 5 to 100 nucleotides |
| 10 to 150 nucleotides | 10 to 150 nucleotides |
| 20 to 150 nucleotides | 20 to 150 nucleotides |

Template Construct No. 1
Template Construct No. 2
Template Construct No. 3

[1100] In an embodiment, a single or dual nickase eaCas9 is used to cleave the target DNA near the site of the mutation, or signature, to be modified, e.g., replaced. While not wishing to be bound by theory, in an embodiment, it is believed that the Cas9 mediated break induces HDR with the template nucleic acid to replace the target DNA sequence with the template sequence.

[1101] V.2 NHEJ Approaches for Gene Targeting

[1102] As described herein, nuclease-induced non-homologous end-joining (NHEJ) can be used to target gene-specific knockouts. Nuclease-induced NHEJ can also be used to remove (e.g., delete) sequences in a gene of interest.

[1103] While not wishing to be bound by theory, it is believed that, in an embodiment, the genomic alterations associated with the methods described herein rely on nuclease-induced NHEJ and the error-prone nature of the NHEJ repair pathway. NHEJ repairs a double-strand break in the DNA by joining together the two ends; however, generally, the original sequence is restored only if two compatible ends, exactly as they were formed by the double-strand break, are perfectly ligated. The DNA ends of the double-strand break are frequently the subject of enzymatic processing, resulting in the addition or removal of nucleotides, at one or both strands, prior to rejoining of the ends. This results in the presence of insertion and/or deletion (indel) mutations in the DNA sequence at the site of the NHEJ repair. Two-thirds of these mutations typically alter the reading frame and, therefore, produce a non-functional protein. Additionally, mutations that maintain the reading frame, but which insert or delete a significant amount of sequence, can destroy functionality of the protein. This is locus dependent as mutations in critical functional domains are likely less tolerable than mutations in non-critical regions of the protein.

[1104] The indel mutations generated by NHEJ are unpredictable in nature; however, at a given break site certain indel sequences are favored and are over represented in the population, likely due to small regions of microhomology. The lengths of deletions can vary widely; most commonly in the 1-50 bp range, but they can reach greater than 100-200 bp. Insertions tend to be shorter and often include short duplications of the sequence immediately surrounding the break site. However, it is possible to obtain large insertions, and in these cases, the inserted sequence has often been traced to other regions of the genome or to plasmid DNA present in the cells.

[1105] Because NHEJ is a mutagenic process, it can also be used to delete small sequence motifs (e.g., motifs less than or equal to 50 nucleotides in length) as long as the generation of a specific final sequence is not required. If a double-strand break is targeted near to a target sequence, the deletion mutations caused by the NHEJ repair often span, and therefore remove, the unwanted nucleotides. For the deletion of larger DNA segments, introducing two double-strand breaks, one on each side of the sequence, can result in NHEJ between the ends with removal of the entire intervening sequence. In this way, DNA segments as large as several hundred kilobases can be deleted. Both of these approaches can be used to delete specific DNA sequences; however, the error-prone nature of NHEJ may still produce indel mutations at the site of repair.

[1106] Both double strand cleaving eaCas9 molecules and single strand, or nickase, eaCas9 molecules can be used in the methods and compositions described herein to generate NHEJ-mediated indels. NHEJ-mediated indels targeted to the the gene, e.g., a coding region, e.g., an early coding region of a gene, of interest can be used to knockout (i.e., eliminate expression of) a gene of interest. For example, early coding region of a gene of interest includes sequence immediately following a start codon, within a first exon of the coding sequence, or within 500 bp of the start codon (e.g., less than 500, 450, 400, 350, 300, 250, 200, 150, 100 or 50 bp).

[1107] Placement of Double Strand or Single Strand Breaks Relative to the Target Position

[1108] In an embodiment, in which a gRNA and Cas9 nuclease generate a double strand break for the purpose of inducing NHEJ-mediated indels, a gRNA, e.g., a unimolecular (or chimeric) or modular gRNA molecule, is configured to position one double-strand break in close proximity to a nucleotide of the target position. In an embodiment, the cleavage site is between 0-30 bp away from the target position (e.g., less than 30, 25, 20, 15, 10, 9, 8, 7, 6, 5, 4, 3, 2 or 1 bp from the target position).

[1109] In an embodiment, in which two gRNAs complexing with Cas9 nickases induce two single strand breaks for the purpose of inducing NHEJ-mediated indels, two gRNAs, e.g., independently, unimolecular (or chimeric) or modular gRNA, are configured to position two single-strand breaks to provide for NHEJ repair a nucleotide of the target position. In an embodiment, the gRNAs are configured to position cuts at the same position, or within a few nucleotides of one another, on different strands, essentially mimicking a double strand break. In an embodiment, the closer nick is between 0-30 bp away from the target position (e.g., less than 30, 25, 20, 15, 10, 9, 8, 7, 6, 5, 4, 3, 2 or 1 bp from the target position), and the two nicks are within 25-55 bp of each other (e.g., between 25 to 50, 25 to 45, 25 to 40, 25 to 35, 25 to 30, 50 to 55, 45 to 55, 40 to 55, 35 to 55, 30 to 55, 30 to 50, 35 to 50, 40 to 50, 45 to 50, 35 to 45, or 40 to 45 bp) and no more than 100 bp away from each other (e.g., no more than 90, 80, 70, 60, 50, 40, 30, 20 or 10 bp). In an embodiment, the gRNAs are configured to place a single strand break on either side of a nucleotide of the target position.

[1110] Both double strand cleaving eaCas9 molecules and single strand, or nickase, eaCas9 molecules can be used in the methods and compositions described herein to generate breaks both sides of a target position. Double strand or paired single strand breaks may be generated on both sides of a target position to remove the nucleic acid sequence between the two cuts (e.g., the region between the two breaks in deleted). In one embodiment, two gRNAs, e.g., independently, unimolecular (or chimeric) or modular gRNA, are configured to position a double-strand break on both sides of a target position. In an alternate embodiment, three gRNAs, e.g., independently, unimolecular (or chimeric) or modular gRNA, are configured to position a double strand break (i.e., one gRNA complexes with a cas9 nuclease) and two single strand breaks or paired single strand breaks (i.e., two gRNAs complex with Cas9 nickases) on either side of the target position. In another embodiment, four gRNAs, e.g., independently, unimolecular (or chimeric) or modular gRNA, are configured to generate two pairs of single strand breaks (i.e., two pairs of two gRNAs complex with Cas9 nickases) on either side of the target position. The double strand break(s) or the closer of the two single strand nicks in a pair will ideally be within 0-500 bp of the target position (e.g., no more than 450, 400, 350, 300, 250, 200, 150, 100, 50 or 25 bp from the target position). When nickases are used, the two nicks in a pair are within 25-55 bp of each other (e.g., between 25 to 50, 25 to 45, 25 to 40, 25 to 35, 25 to 30, 50 to 55, 45 to 55, 40 to 55, 35 to 55, 30 to 55, 30 to 50, 35 to 50, 40 to 50, 45 to 50, 35 to 45, or 40 to 45 bp) and no more than 100 bp away from each other (e.g., no more than 90, 80, 70, 60, 50, 40, 30, 20 or 10 bp).

[1111] V.3 Single-Strand Annealing

[1112] Single strand annealing (SSA) is another DNA repair process that repairs a double-strand break between two repeat sequences present in a target nucleic acid. Repeat sequences utilized by the SSA pathway are generally greater than 30 nucleotides in length. Resection at the break ends occurs to reveal repeat sequences on both strands of the target nucleic acid. After resection, single strand overhangs containing the repeat sequences are coated with RPA protein to prevent the repeats sequences from inappropriate annealing, e.g., to themselves. RAD52 binds to and each of the repeat sequences on the overhangs and aligns the sequences to enable the annealing of the complementary repeat sequences. After annealing, the single-strand flaps of the overhangs are cleaved. New DNA synthesis fills in any gaps, and ligation restores the DNA duplex. As a result of the processing, the DNA sequence between the two repeats is deleted. The length of the deletion can depend on many factors including the location of the two repeats utilized, and the pathway or processivity of the resection.

[1113] In contrast to HDR pathways, SSA does not require a template nucleic acid to alter or correct a target nucleic acid sequence. Instead, the complementary repeat sequence is utilized.

[1114] V. 4 Other DNA Repair Pathways

[1115] SSBR (Single Strand Break Repair)

[1116] Single-stranded breaks (SSB) in the genome are repaired by the SSBR pathway, which is a distinct mechanism from the DSB repair mechanisms discussed above. The SSBR pathway has four major stages: SSB detection, DNA end processing, DNA gap filling, and DNA ligation. A more detailed explanation is given in Caldecott, Nature Reviews Genetics 9, 619-631 (August 2008), and a summary is given here.

[1117] In the first stage, when a SSB forms, PARP1 and/or PARP2 recognize the break and recruit repair machinery. The binding and activity of PARP1 at DNA breaks is transient and it seems to accelerate SSBr by promoting the focal accumulation or stability of SSBr protein complexes at the lesion. Arguably the most important of these SSBr proteins is XRCC1, which functions as a molecular scaffold that interacts with, stabilizes, and stimulates multiple enzymatic components of the SSBr process including the protein responsible for cleaning the DNA 3′ and 5′ ends. For instance, XRCC1 interacts with several proteins (DNA polymerase beta, PNK, and three nucleases, APE1, APTX, and APLF) that promote end processing. APE1 has endonuclease activity. APLF exhibits endonuclease and 3′ to 5′ exonuclease activities. APTX has endonuclease and 3′ to 5′ exonuclease activity.

[1118] This end processing is an important stage of SSBR since the 3′- and/or 5′-termini of most, if not all, SSBs are ‘damaged’. End processing generally involves restoring a damaged 3′-end to a hydroxylated state and and/or a damaged 5′ end to a phosphate moiety, so that the ends become ligation-competent. Enzymes that can process damaged 3′ termini include PNKP, APE1, and TDP1. Enzymes that can process damaged 5′ termini include PNKP, DNA polymerase beta, and APTX. LIG3 (DNA ligase III) can also participate in end processing. Once the ends are cleaned, gap filling can occur.

[1119] At the DNA gap filling stage, the proteins typically present are PARP1, DNA polymerase beta, XRCC1, FEN1 (flap endonuclease 1), DNA polymerase delta/epsilon, PCNA, and LIG1. There are two ways of gap filling, the short patch repair and the long patch repair. Short patch repair involves the insertion of a single nucleotide that is missing. At some SSBs, “gap filling” might continue displacing two or more nucleotides (displacement of up to 12 bases have been reported). FEN1 is an endonuclease that removes the displaced 5′-residues. Multiple DNA polymerases, including Pol β, are involved in the repair of SSBs, with the choice of DNA polymerase influenced by the source and type of SSB.

[1120] In the fourth stage, a DNA ligase such as LIG1 (Ligase I) or LIG3 (Ligase III) catalyzes joining of the ends. Short patch repair uses Ligase III and long patch repair uses Ligase I.

[1121] Sometimes, SSBR is replication-coupled. This pathway can involve one or more of CtIP, MRN, ERCC1, and FEN1. Additional factors that may promote SSBR include: aPARP, PARP1, PARP2, PARG, XRCC1, DNA polymerase b, DNA polymerase d, DNA polymerase e, PCNA, LIG1, PNK, PNKP, APE1, APTX, APLF, TDP1, LIG3, FEN1, CtIP, MRN, and ERCC1.

[1122] MMR (Mismatch Repair)

[1123] Cells contain three excision repair pathways: MMR, BER, and NER. The excision repair pathways have a common feature in that they typically recognize a lesion on one strand of the DNA, then exo/endonucleaseases remove the lesion and leave a 1-30 nucleotide gap that is subsequentially filled in by DNA polymerase and finally sealed with ligase. A more complete picture is given in Li, Cell Research (2008) 18:85-98, and a summary is provided here.

[1124] Mismatch repair (MMR) operates on mispaired DNA bases.

[1125] The MSH2/6 or MSH2/3 complexes both have ATPases activity that plays an important role in mismatch recognition and the initiation of repair. MSH2/6 preferentially recognizes base-base mismatches and identifies mispairs of 1 or 2 nucleotides, while MSH2/3 preferentially recognizes larger ID mispairs.

[1126] hMLH1 heterodimerizes with hPMS2 to form hMutL α which possesses an ATPase activity and is important for multiple steps of MMR. It possesses a PCNA/replication factor C (RFC)-dependent endonuclease activity which plays an important role in 3′ nick-directed MMR involving EXO1. (EXO1 is a participant in both HR and MMR.) It regulates termination of mismatch-provoked excision. Ligase I is the relevant ligase for this pathway. Additional factors that may promote MMR include: EXO1, MSH2, MSH3, MSH6, MLH1, PMS2, MLH3, DNA Pol d, RPA, HMGB1, RFC, and DNA ligase I.

[1127] Base Excision Repair (BER)

[1128] The base excision repair (BER) pathway is active throughout the cell cycle; it is responsible primarily for removing small, non-helix-distorting base lesions from the genome. In contrast, the related Nucleotide Excision Repair pathway (discussed in the next section) repairs bulky helix-distorting lesions. A more detailed explanation is given in Caldecott, Nature Reviews Genetics 9, 619-631 (August 2008), and a summary is given here.

[1129] Upon DNA base damage, base excision repair (BER) is initiated and the process can be simplified into five major steps: (a) removal of the damaged DNA base; (b) incision of the subsequent a basic site; (c) clean-up of the DNA ends; (d) insertion of the correct nucleotide into the repair gap; and (e) ligation of the remaining nick in the DNA backbone. These last steps are similar to the SSBR.

[1130] In the first step, a damage-specific DNA glycosylase excises the damaged base through cleavage of the N-glycosidic bond linking the base to the sugar phosphate backbone. Then AP endonuclease-1 (APE1) or bifunctional DNA glycosylases with an associated lyase activity incised the phosphodiester backbone to create a DNA single strand break (SSB). The third step of BER involves cleaning-up of the DNA ends. The fourth step in BER is conducted by Pol β that adds a new complementary nucleotide into the repair gap and in the final step XRCC1/Ligase III seals the remaining nick in the DNA backbone. This completes the short-patch BER pathway in which the majority (˜80%) of damaged DNA bases are repaired. However, if the 5′-ends in step 3 are resistant to end processing activity, following one nucleotide insertion by Pol β there is then a polymerase switch to the replicative DNA polymerases, Pol δ/ε, which then add ˜2-8 more nucleotides into the DNA repair gap. This creates a 5′-flap structure, which is recognized and excised by flap endonuclease-1 (FEN-1) in association with the processivity factor proliferating cell nuclear antigen (PCNA). DNA ligase I then seals the remaining nick in the DNA backbone and completes long-patch BER. Additional factors that may promote the BER pathway include: DNA glycosylase, APE1, Polb, Pold, Pole, XRCC1, Ligase III, FEN-1, PCNA, RECQL4, WRN, MYH, PNKP, and APTX.

[1131] Nucleotide Excision Repair (NER)

[1132] Nucleotide excision repair (NER) is an important excision mechanism that removes bulky helix-distorting lesions from DNA. Additional details about NER are given in Marteijn et al., Nature Reviews Molecular Cell Biology 15, 465-481 (2014), and a summary is given here. NER a broad pathway encompassing two smaller pathways: global genomic NER (GG-NER) and transcription coupled repair NER (TC-NER). GG-NER and TC-NER use different factors for recognizing DNA damage. However, they utilize the same machinery for lesion incision, repair, and ligation.

[1133] Once damage is recognized, the cell removes a short single-stranded DNA segment that contains the lesion. Endonucleases XPF/ERCC1 and XPG (encoded by ERCC5) remove the lesion by cutting the damaged strand on either side of the lesion, resulting in a single-strand gap of 22-30 nucleotides. Next, the cell performs DNA gap filling synthesis and ligation. Involved in this process are: PCNA, RFC, DNA Pol δ, DNA Pol ε or DNA Pol κ, and DNA ligase I or XRCC1/Ligase III. Replicating cells tend to use DNA pol ε and DNA ligase I, while non-replicating cells tend to use DNA Pol δ, DNA Pol κ, and the XRCC1/Ligase III complex to perform the ligation step.

[1134] NER can involve the following factors: XPA-G, POLH, XPF, ERCC1, XPA-G, and LIG1. Transcription-coupled NER (TC-NER) can involve the following factors: CSA, CSB, XPB, XPD, XPG, ERCC1, and TTDA. Additional factors that may promote the NER repair pathway include XPA-G, POLH, XPF, ERCC1, XPA-G, LIG1, CSA, CSB, XPA, XPB, XPC, XPD, XPF, XPG, TTDA, UVSSA, USP7, CETN2, RAD23B, UV-DDB, CAK subcomplex, RPA, and PCNA.

[1135] Interstrand Crosslink (ICL)

[1136] A dedicated pathway called the ICL repair pathway repairs interstrand crosslinks. Interstrand crosslinks, or covalent crosslinks between bases in different DNA strand, can occur during replication or transcription. ICL repair involves the coordination of multiple repair processes, in particular, nucleolytic activity, translesion synthesis (TLS), and HDR. Nucleases are recruited to excise the ICL on either side of the crosslinked bases, while TLS and HDR are coordinated to repair the cut strands. ICL repair can involve the following factors: endonucleases, e.g., XPF and RAD51C, endonucleases such as RAD51, translesion polymerases, e.g., DNA polymerase zeta and Rev1), and the Fanconi anemia (FA) proteins, e.g., FancJ.

[1137] Other Pathways

[1138] Several other DNA repair pathways exist in mammals.

[1139] Translesion synthesis (TLS) is a pathway for repairing a single stranded break left after a defective replication event and involves translesion polymerases, e.g., DNA polζ and Rev1.

[1140] Error-free postreplication repair (PRR) is another pathway for repairing a single stranded break left after a defective replication event.

[1141] V.5 Examples of gRNAs in Genome Editing Methods

[1142] gRNAs as described herein can be used with a Cas9 molecule that cleaves both or a single strand and a template nucleic acid to alter the sequence of a target nucleic acid, e.g., at a target position or a target genetic signature. gRNAs useful in these method are described below.

[1143] In an embodiment, the gRNA, e.g., a chimeric gRNA, is configured such that it comprises one or more of the following properties;

[1144] a) it can position, e.g., when targeting a Cas9 molecule that makes double strand breaks, a double strand break (i) within 50, 100, 150 or 200 nucleotides of a target position, or (ii) sufficiently close that the target position is within the region of end resection;

[1145] b) it has a targeting domain of at least 17 nucleotides, e.g., a targeting domain of (i) 17, (ii) 18, or (iii) 20 nucleotides; and

[1146] c) the tail domain is (i) at least 10, 15, 20, 25, 30, 35 or 40 nucleotides in length or (ii) the tail domain comprises 15, 20, 25, 30, 35, 40 nucleotides or all of the corresponding portions of a naturally occurring tail domain, e.g., a naturally occurring S. pyogenes or S. thermophilus tail domain.

[1147] In an embodiment, the gRNA is configured such that it comprises properties: a and b(i).

[1148] In an embodiment, the gRNA is configured such that it comprises properties: a and b(ii).

[1149] In an embodiment, the gRNA is configured such that it comprises properties: a and b(iii).

[1150] In an embodiment, the gRNA is configured such that it comprises properties: a and c.

[1151] In an embodiment, the gRNA is configured such that in comprises properties: a, b, and c.

[1152] In an embodiment, the gRNA is configured such that in comprises properties: a(i), b(i), and c(i).

[1153] In an embodiment, the gRNA is configured such that in comprises properties: a(i), b(i), and c(ii).

[1154] In an embodiment, the gRNA is configured such that in comprises properties: a(i), b(iii), and c(i).

[1155] In an embodiment, the gRNA is configured such that in comprises properties: a(i), b(iii), and c(ii).

[1156] In an embodiment, the gRNA, e.g., a chimeric gRNA, is configured such that it comprises one or more of the following properties;

[1157] a) it can position, e.g., when targeting a Cas9 molecule that makes single strand breaks, a single strand break (i) within 50, 100, 150 or 200 nucleotides of a target position, or (ii) sufficiently close that the target position is within the region of end resection;

[1158] b) it has a targeting domain of at least 17 nucleotides, e.g., a targeting domain of (i) 17, (ii) 18, or (iii) 20 nucleotides; and

[1159] c) the tail domain is (i) at least 10, 15, 20, 25, 30, 35 or 40 nucleotides in length, or (ii) the tail domain comprises 15, 20, 25, 30, 35, 40 nucleotides or all of the corresponding portions of a naturally occurring tail domain, e.g., a naturally occurring S. pyogenes or S. thermophilus tail domain.

[1160] In an embodiment, the gRNA is configured such that it comprises properties: a and b(i).

[1161] In an embodiment, the gRNA is configured such that it comprises properties: a and b(ii).

[1162] In an embodiment, the gRNA is configured such that it comprises properties: a and b(iii).

[1163] In an embodiment, the gRNA is configured such that it comprises properties: a and c.

[1164] In an embodiment, the gRNA is configured such that in comprises properties: a, b, and c.

[1165] In an embodiment, the gRNA is configured such that in comprises properties: a(i), b(i), and c(i).

[1166] In an embodiment, the gRNA is configured such that in comprises properties: a(i), b(i), and c(ii).

[1167] In an embodiment, the gRNA is configured such that in comprises properties: a(i), b(iii), and c(i).

[1168] In an embodiment, the gRNA is configured such that in comprises properties: a(i), b(iii), and c(ii).

[1169] In an embodiment, the gRNA is used with a Cas9 nickase molecule having HNH activity, e.g., a Cas9 molecule having the RuvC activity inactivated, e.g., a Cas9 molecule having a mutation at D10, e.g., the D10A mutation.

[1170] In an embodiment, the gRNA is used with a Cas9 nickase molecule having RuvC activity, e.g., a Cas9 molecule having the HNH activity inactivated, e.g., a Cas9 molecule having a mutation at H840, e.g., a H840A.

[1171] In an embodiment, a pair of gRNAs, e.g., a pair of chimeric gRNAs, comprising a first and a second gRNA, is configured such that they comprises one or more of the following properties;

[1172] a) one or both of the gRNAs can position, e.g., when targeting a Cas9 molecule that makes single strand breaks, a single strand break within (i) 50, 100, 150 or 200 nucleotides of a target position, or (ii) sufficiently close that the target position is within the region of end resection;

[1173] b) one or both have a targeting domain of at least 17 nucleotides, e.g., a targeting domain of (i) 17 or (ii) 18 nucleotides; and

[1174] c) the tail domain of one or both is (i) at least 10, 15, 20, 25, 30, 35 or 40 nucleotides in length of (ii) comprises, 15, 20, 25, 30, 35, 40, or all of the corresponding portions of a naturally occurring tail domain, e.g., a naturally occurring S. pyogenes, S. aureus or S. thermophilus tail domain.

[1175] d) the gRNAs are configured such that, when hybridized to target nucleic acid, they are separated by 0-50, 0-100, 0-200, at least 10, at least 20, at least 30 or at least 50 nucleotides;

[1176] e) the breaks made by the first gRNA and second gRNA are on different strands; and

[1177] f) the PAMs are facing outwards.

[1178] In an embodiment, one or both of the gRNAs is configured such that it comprises properties: a and b(i).

[1179] In an embodiment, one or both of the gRNAs is configured such that it comprises properties: a and b(ii).

[1180] In an embodiment, one or both of the gRNAs is configured such that it comprises properties: a and b(iii).

[1181] In an embodiment, one or both of the gRNAs configured such that it comprises properties: a and c.

[1182] In an embodiment, one or both of the gRNAs is configured such that in comprises properties: a, b, and c.

[1183] In an embodiment, one or both of the gRNAs is configured such that in comprises properties: a(i), b(i), and c(i).

[1184] In an embodiment, one or both of the gRNAs is configured such that in comprises properties: a(i), b(i), and c(ii).

[1185] In an embodiment, one or both of the gRNAs is configured such that in comprises properties: a(i), b(i), c, and d.

[1186] In an embodiment, one or both of the gRNAs is configured such that in comprises properties: a(i), b(i), c, and e.

[1187] In an embodiment, one or both of the gRNAs is configured such that in comprises properties: a(i), b(i), c, d, and e.

[1188] In an embodiment, one or both of the gRNAs is configured such that in comprises properties: a(i), b(iii), and c(i).

[1189] In an embodiment, one or both of the gRNAs is configured such that in comprises properties: a(i), b(iii), and c(ii).

[1190] In an embodiment, one or both of the gRNAs is configured such that in comprises properties: a(i), b(iii), c, and d.

[1191] In an embodiment, one or both of the gRNAs is configured such that in comprises properties: a(i), b(iii), c, and e.

[1192] In an embodiment, one or both of the gRNAs is configured such that in comprises properties: a(i), b(iii), c, d, and e.

[1193] In an embodiment, the gRNAs are used with a Cas9 nickase molecule having HNH activity, e.g., a Cas9 molecule having the RuvC activity inactivated, e.g., a Cas9 molecule having a mutation at D10, e.g., the D10A mutation.

[1194] In an embodiment, the gRNAs are used with a Cas9 nickase molecule having RuvC activity, e.g., a Cas9 molecule having the HNH activity inactivated, e.g., a Cas9 molecule having a mutation at H840, e.g., a H840A.

[1195] In an embodiment, the gRNAs are used with a Cas9 nickase molecule having RuvC activity, e.g., a Cas9 molecule having the HNH activity inactivated, e.g., a Cas9 molecule having a mutation at H863, e.g., a H863A.

### VI. Target Cells

[1196] Cas9 molecules and gRNA molecules, e.g., a Cas9 molecule/gRNA molecule complex, can be used to manipulate a cell, e.g., to edit a target nucleic acid, in a wide variety of cells.

[1197] In some embodiments, a cell is manipulated by editing (e.g., correcting) one or more target genes, e.g., as described herein. In some embodiments, the expression of one or more target genes (e.g., one or more target genes described herein) is modulated, e.g., in vivo.

[1198] In an embodiment, the target cell is a retinal cell, e.g., a cell of the retinal pigment epithelium or a photoreceptor cell. In an embodiment, the target cell is a cone photoreceptor cell or cone cell, a rod photoreceptor cell or rod cell, or a macular cone photoreceptor cell. Cone photoreceptor cells in the macula are the first to demonstrate cell death in Usher Syndrome and in cone-rod dystrophies in general (this is the opposite of rod-cone dystrophies). In an exemplary embodiment, cone photoreceptors in the macular are targeted, i.e., cone photoreceptors in the macular are the target cells. In an embodiment, the target cell is a cochlear cell, e.g. an inner hair cell or an outer hair cell.

[1199] In an embodiment, the target cell is removed from the subject, the mutation corrected ex vivo, and the cell returned to the subject. In an embodiment, a photoreceptor cell is removed from the subject, the mutation corrected ex vivo, and the photoreceptor cell returned to the subject. In an embodiment, a cone photoreceptor cell is removed from the subject, the mutation corrected ex vivo, and the cone photoreceptor cell returned to the subject. In an embodiment, an inner or outer hair cell is removed from the subject, the mutation corrected ex vivo, and the inner or outer hair cell returned to the subject.

[1200] In an embodiment, the cells are induced pluripotent stem cells (iPS) cells or cells derived from iPS cells, e.g., iPS cells from the subject, modified to alter the gene and differentiated into retinal progenitor cells or retinal cells, e.g., retinal photoreceptors, and injected into the eye of the subject, e.g., subretinally, e.g., in the submacular region of the retina.

[1201] In an embodiment, the cells are induced pluripotent stem cells (iPS) cells or cells derived from iPS cells, e.g., iPS cells from the subject, modified to alter the gene and differentiated into cochlear cells, e.g., inner or outer hair cells, and injected into the cochlea of the subject.

[1202] In an embodiment, the cells are targeted in vivo, e.g., by delivery of the components, e.g., a Cas9 molecule and gRNA molecules, or a Cas9 molecule, gRNA molecules and donor template, to the target cells. In an embodiment, the target cells are retinal pigment epithelium or photoreceptor cells. In an embodiment, the target cells are inner or outer hair cells of the cochlea. In an embodiment, AAV is used to transduce the target cells.

### VII. Delivery, Formulations and Routes of Administration

[1203] The components, e.g., a Cas9 molecule, gRNA molecule or template construct molecule, or all three, can be delivered, formulated, or administered in a variety of forms, see, e.g., Tables 14 and 15. When a Cas9 or gRNA component is delivered encoded in DNA the DNA will typically include a control region, e.g., comprising a promoter, to effect expression. Useful promoters for Cas9 molecule sequences include CMV, EF-1a, MSCV, PGK, CAG control promoters. Useful promoters for gRNAs include H1, EF-la and U6 promoters. Promoters with similar or dissimilar strengths can be selected to tune the expression of components. Sequences encoding a Cas9 molecule can comprise a nuclear localization signal (NLS), e.g., an SV40 NLS. In an embodiment, a promoter for a Cas9 molecule or a gRNA molecule can be, independently, inducible, tissue specific, or cell specific.

[1204] Table 14 provides examples of how the components can be formulated, delivered, or administered.

TABLE 14
Elements

| | | Donor | |
|---|---|---|---|
| Cas9 | gRNA | Template | |
| Molecule(s) | Molecule(s) | Nucleic Acid | Comments |
| DNA | DNA | DNA | In this embodiment, a Cas9 molecule, typically |
| | | | an eaCas9 molecule, and a gRNA are transcribed |
| | | | from DNA. In this embodiment, they are |
| | | | encoded on separate molecules. In this |
| | | | embodiment, the donor template is provided as a |
| | | | separate DNA molecule. |
| DNA | DNA | | In this embodiment, a Cas9 molecule, typically |
| | | | an eaCas9 molecule, and a gRNA are transcribed |
| | | | from DNA. In this embodiment, they are |
| | | | encoded on separate molecules. In this |
| | | | embodiment, the donor template is provided on |
| | | | the same DNA molecule that encodes the gRNA. |
| DNA | | DNA | In this embodiment, a Cas9 molecule, typically |
| | | | an eaCas9 molecule, and a gRNA are transcribed |
| | | | from DNA, here from a single molecule. In this |
| | | | embodiment, the donor template is provided as a |
| | | | separate DNA molecule. |
| DNA | DNA | DNA | In this embodiment, a Cas9 molecule, typically |
| | | | an eaCas9 molecule, and a gRNA are transcribed |
| | | | from DNA. In this embodiment, they are |
| | | | encoded on separate molecules. In this |
| | | | embodiment, the donor template is provided on |
| | | | the same DNA molecule that encodes the Cas9. |
| DNA | RNA | DNA | In this embodiment, a Cas9 molecule, typically |
| | | | an eaCas9 molecule, is transcribed from DNA, |
| | | | and a gRNA is provided as in vitro transcribed or |
| | | | synthesized RNA. In this embodiment, the donor |
| | | | template is provided as a separate DNA molecule. |
| DNA | RNA | DNA | In this embodiment, a Cas9 molecule, typically |
| | | | an eaCas9 molecule, is transcribed from DNA, |
| | | | and a gRNA is provided as in vitro transcribed or |
| | | | synthesized RNA. In this embodiment, the donor |
| | | | template is provided on the same DNA molecule |
| | | | that encodes the Cas9. |
| mRNA | RNA | DNA | In this embodiment, a Cas9 molecule, typically |
| | | | an eaCas9 molecule, is translated from in vitro |
| | | | transcribed mRNA, and a gRNA is provided as in |
| | | | vitro transcribed or synthesized RNA. In this |
| | | | embodiment, the donor template is provided as a |
| | | | DNA molecule. |
| mRNA | DNA | DNA | In this embodiment, a Cas9 molecule, typically |
| | | | an eaCas9 molecule, is translated from in vitro |
| | | | transcribed mRNA, and a gRNA is transcribed |
| | | | from DNA. In this embodiment, the donor |
| | | | template is provided as a separate DNA molecule. |
| mRNA | DNA | | In this embodiment, a Cas9 molecule, typically |
| | | | an eaCas9 molecule, is translated from in vitro |
| | | | transcribed mRNA, and a gRNA is transcribed |
| | | | from DNA. In this embodiment, the donor |
| | | | template is provided on the same DNA molecule |
| | | | that encodes the gRNA. |
| Protein | DNA | DNA | In this embodiment, a Cas9 molecule, typically |
| | | | an eaCas9 molecule, is provided as a protein, and |
| | | | a gRNA is transcribed from DNA. In this |
| | | | embodiment, the donor template is provided as a |
| | | | separate DNA molecule. |
| Protein | DNA | | In this embodiment, a Cas9 molecule, typically |
| | | | an eaCas9 molecule, is provided as a protein, and |
| | | | a gRNA is transcribed from DNA. In this |
| | | | embodiment, the donor template is provided on |
| | | | the same DNA molecule that encodes the gRNA. |
| Protein | RNA | DNA | In this embodiment, an eaCas9 molecule is |
| | | | provided as a protein, and a gRNA is provided as |
| | | | transcribed or synthesized RNA. In this |
| | | | embodiment, the donor template is provided as a |
| | | | DNA molecule. |
| DNA | DNA | DNA | In this embodiment, a Cas9 molecule, typically |
| | | | an eaCas9 molecule, and a gRNA are |
| | | | transcribed from DNA. In this embodiment, |
| | | | they are encoded on separate molecules. In this |
| | | | embodiment, the donor template is provided as |
| | | | a separate DNA molecule. |
| DNA | DNA | | In this embodiment, a Cas9 molecule, typically |
| | | | an eaCas9 molecule, and a gRNA are |
| | | | transcribed from DNA. In this embodiment, |
| | | | they are encoded on separate molecules. In this |
| | | | embodiment, the donor template is provided on |
| | | | the same DNA molecule that encodes the |
| | | | gRNA. |
| DNA | | DNA | In this embodiment, a Cas9 molecule, typically |
| | | | an eaCas9 molecule, and a gRNA are |
| | | | transcribed from DNA, here from a single |
| | | | molecule. In this embodiment, the donor |
| | | | template is provided as a separate DNA |
| | | | molecule. |
| DNA | DNA | DNA | In this embodiment, a Cas9 molecule, typically |
| | | | an eaCas9 molecule, and a gRNA are |
| | | | transcribed from DNA. In this embodiment, |
| | | | they are encoded on separate molecules. In this |
| | | | embodiment, the donor template is provided on |
| | | | the same DNA molecule that encodes the Cas9. |
| DNA | RNA | DNA | In this embodiment, a Cas9 molecule, typically |
| | | | an eaCas9 molecule, is transcribed from DNA, |
| | | | and a gRNA is provided as in vitro transcribed |
| | | | or synthesized RNA. In this embodiment, the |
| | | | donor template is provided as a separate DNA |
| | | | molecule. |
| DNA | RNA | DNA | In this embodiment, a Cas9 molecule, typically |
| | | | an eaCas9 molecule, is transcribed from DNA, |
| | | | and a gRNA is provided as in vitro transcribed |
| | | | or synthesized RNA. In this embodiment, the |
| | | | donor template is provided on the same DNA |
| | | | molecule that encodes the Cas9. |
| mRNA | RNA | DNA | In this embodiment, a Cas9 molecule, typically |
| | | | an eaCas9 molecule, is translated from in vitro |
| | | | transcribed mRNA, and a gRNA is provided as |
| | | | in vitro transcribed or synthesized RNA. In this |
| | | | embodiment, the donor template is provided as |
| | | | a DNA molecule. |
| mRNA | DNA | DNA | In this embodiment, a Cas9 molecule, typically |
| | | | an eaCas9 molecule, is translated from in vitro |
| | | | transcribed mRNA, and a gRNA is transcribed |
| | | | from DNA. In this embodiment, the donor |
| | | | template is provided as a separate DNA |
| | | | molecule. |
| mRNA | DNA | | In this embodiment, a Cas9 molecule, typically |
| | | | an eaCas9 molecule, is translated from in vitro |
| | | | transcribed mRNA, and a gRNA is transcribed |
| | | | from DNA. In this embodiment, the donor |
| | | | template is provided on the same DNA |
| | | | molecule that encodes the gRNA. |
| Protein | DNA | DNA | In this embodiment, a Cas9 molecule, typically |
| | | | an eaCas9 molecule, is provided as a protein, |
| | | | and a gRNA is transcribed from DNA. In this |
| | | | embodiment, the donor template is provided as |
| | | | a separate DNA molecule. |
| Protein | DNA | | In this embodiment, a Cas9 molecule, typically |
| | | | an eaCas9 molecule, is provided as a protein, |
| | | | and a gRNA is transcribed from DNA. In this |
| | | | embodiment, the donor template is provided on |
| | | | the same DNA molecule that encodes the |
| | | | gRNA. |
| Protein | RNA | DNA | In this embodiment, an eaCas9 molecule is |
| | | | provided as a protein, and a gRNA is provided |
| | | | as transcribed or synthesized RNA. In this |
| | | | embodiment, the donor template is provided as |
| | | | a DNA molecule. |

[1205] Table 15 summarizes various delivery methods for the components of a Cas system, e.g., the Cas9 molecule component and the gRNA molecule component, as described herein.

TABLE 15

| | | Delivery | | | |
|---|---|---|---|---|---|
| | | into Non- | Duration | | Type of |
| | | Dividing | of | Genome | Molecule |
| Delivery Vector/Mode | | Cells | Expression | Integration | Delivered |
| Physical (eg, electroporation, | | YES | Transient | NO | Nucleic Acids |
| particle gun, Calcium | | | | | and Proteins |
| Phosphate transfection) | | | | | |
| Viral | Retrovirus | NO | Stable | YES | RNA |
| | Lentivirus | YES | Stable | YES/NO with | RNA |
| | | | | modifications | |
| | Adenovirus | YES | Transient | NO | DNA |
| | Adeno- | YES | Stable | NO | DNA |
| | Associated | | | | |
| | Virus (AAV) | | | | |
| | Vaccinia Virus | YES | Very | NO | DNA |
| | | | Transient | | |
| | Herpes Simplex | YES | Stable | NO | DNA |
| | Virus | | | | |
| Non-Viral | Cationic | YES | Transient | Depends on | Nucleic Acids |
| | Liposomes | | | what is | and Proteins |
| | | | | delivered | |
| | Polymeric | YES | Transient | Depends on | Nucleic Acids |
| | Nanoparticles | | | what is | and Proteins |
| | | | | delivered | |
| Biological | Attenuated | YES | Transient | NO | Nucleic Acids |
| Non-Viral | Bacteria | | | | |
| Delivery | Engineered | YES | Transient | NO | Nucleic Acids |
| Vehicles | Bacteriophages | | | | |
| | Mammalian | YES | Transient | NO | Nucleic Acids |
| | Virus-like | | | | |
| | Particles | | | | |
| | Biological | YES | Transient | NO | Nucleic Acids |
| | liposomes: | | | | |
| | Erythrocyte | | | | |
| | Ghosts and | | | | |
| | Exosomes | | | | |

DNA-Based Delivery of a Cas9 Molecule and or One or More gRNA Molecules

[1206] Nucleic acids encoding Cas9 molecules (e.g., eaCas9 molecules) and/or gRNA molecules, can be administered to subjects or delivered into cells by art-known methods or as described herein. For example, Cas9-encoding and/or gRNA-encoding DNA can be delivered, e.g., by vectors (e.g., viral or non-viral vectors), non-vector based methods (e.g., using naked DNA or DNA complexes), or a combination thereof.

[1207] DNA encoding Cas9 molecules (e.g., eaCas9 molecules) and/or gRNA molecules can be conjugated to molecules (e.g., N-acetylgalactosamine) promoting uptake by the target cells (e.g., hepatocytes). Donor template molecules can be conjugated to molecules (e.g., N-acetylgalactosamine) promoting uptake by the target cells (e.g., hepatocytes).

[1208] In some embodiments, the Cas9- and/or gRNA-encoding DNA is delivered by a vector (e.g., viral vector/virus or plasmid).

[1209] Vectors can comprise a sequence that encodes a Cas9 molecule and/or a gRNA molecule.

[1210] A vectors can also comprise a sequence encoding a signal peptide (e.g., for nuclear localization, nucleolar localization, mitochondrial localization), fused, e.g., to a Cas9 molecule sequence. For example, the vectors can comprise a nuclear localization sequence (e.g., from SV40) fused to the sequence encoding the Cas9 molecule.

[1211] One or more regulatory/control elements, e.g., promoters, enhancers, introns, polyadenylation signals, Kozak consensus sequences, and internal ribosome entry sites (IRES), can be included in the vectors. In some embodiments, the promoter is recognized by RNA polymerase II (e.g., a CMV promoter). In other embodiments, the promoter is recognized by RNA polymerase III (e.g., a U6 promoter). In some embodiments, the promoter is a regulated promoter (e.g., inducible promoter). In other embodiments, the promoter is a constitutive promoter. In some embodiments, the promoter is a tissue specific promoter. In some embodiments, the promoter is a viral promoter. In other embodiments, the promoter is a non-viral promoter.

[1212] In some embodiments, the vector is a viral vector (e.g., for generation of recombinant viruses). In some embodiments, the virus is a DNA virus (e.g., dsDNA or ssDNA virus). In other embodiments, the virus is an RNA virus (e.g., an ssRNA virus). In some embodiments, the virus infects dividing cells. In other embodiments, the virus infects non-dividing cells. Exemplary viral vectors/viruses include, e.g., retroviruses, lentiviruses, adenovirus, adeno-associated virus (AAV), vaccinia viruses, poxviruses, and herpes simplex viruses.

[1213] In some embodiments, the virus infects both dividing and non-dividing cells. In some embodiments, the virus can integrate into the host genome. In some embodiments, the virus is engineered to have reduced immunity, e.g., in human. In some embodiments, the virus is replication-competent. In other embodiments, the virus is replication-defective, e.g., having one or more coding regions for the genes necessary for additional rounds of virion replication and/or packaging replaced with other genes or deleted. In some embodiments, the virus causes transient expression of the Cas9 molecule and/or the gRNA molecule. In other embodiments, the virus causes long-lasting, e.g., at least 1 week, 2 weeks, 1 month, 2 months, 3 months, 6 months, 9 months, 1 year, 2 years, or permanent expression, of the Cas9 molecule and/or the gRNA molecule. The packaging capacity of the viruses may vary, e.g., from at least about 4 kb to at least about 30 kb, e.g., at least about 5 kb, 10 kb, 15 kb, 20 kb, 25 kb, 30 kb, 35 kb, 40 kb, 45 kb, or 50 kb.

[1214] Exemplary viral vectors/viruses include, e.g., retroviruses, lentiviruses, adenovirus, adeno-associated virus (AAV), vaccinia viruses, poxviruses, and herpes simplex viruses.

[1215] In some embodiments, the Cas9- and/or gRNA-encoding DNA is delivered by a recombinant retrovirus. In some embodiments, the retrovirus (e.g., Moloney murine leukemia virus) comprises a reverse transcriptase, e.g., that allows integration into the host genome. In some embodiments, the retrovirus is replication-competent. In other embodiments, the retrovirus is replication-defective, e.g., having one of more coding regions for the genes necessary for additional rounds of virion replication and packaging replaced with other genes, or deleted.

[1216] In some embodiments, the Cas9- and/or gRNA-encoding DNA is delivered by a recombinant lentivirus. For example, the lentivirus is replication-defective, e.g., does not comprise one or more genes required for viral replication.

[1217] In some embodiments, the Cas9- and/or gRNA-encoding DNA is delivered by a recombinant adenovirus. In some embodiments, the adenovirus is engineered to have reduced immunity in human.

[1218] In some embodiments, the Cas9- and/or gRNA-encoding DNA is delivered by a recombinant AAV. In some embodiments, the AAV can incorporate its genome into that of the host cell. In some embodiments, the AAV is a self-complementary adeno-associated virus (scAAV), e.g., a scAAV that packages both strands which anneal together to form double stranded DNA.

[1219] In some embodiments, the Cas9- and/or gRNA-encoding DNA is delivered by a hybrid virus, e.g., a hybrid of one or more of the viruses described herein.

[1220] A Packaging cell is used to form a virus particle that is capable of infecting a target cell. Such a cell includes a 293 cell, which can package adenovirus, and a _{ψ}2 cell or a PA317 cell, which can package retrovirus. A viral vector used in gene therapy is usually generated by a producer cell line that packages a nucleic acid vector into a viral particle. The vector typically contains the minimal viral sequences required for packaging and subsequent integration into a host or target cell (if applicable), with other viral sequences being replaced by an expression cassette encoding the protein to be expressed, e.g. Cas9. For example, an AAV vector used in gene therapy typically only possesses inverted terminal repeat (ITR) sequences from the AAV genome which are required for packaging and gene expression in the host or target cell. The missing viral functions are supplied in trans by the packaging cell line. Henceforth, the viral DNA is packaged in a cell line, which contains a helper plasmid encoding the other AAV genes, namely rep and cap, but lacking ITR sequences. The cell line is also infected with adenovirus as a helper. The helper virus promotes replication of the AAV vector and expression of AAV genes from the helper plasmid. The helper plasmid is not packaged in significant amounts due to a lack of ITR sequences. Contamination with adenovirus can be reduced by, e.g., heat treatment to which adenovirus is more sensitive than AAV.

[1221] In an embodiment, the viral vector has the ability of cell type and/or tissue type recognition. For example, the viral vector can be pseudotyped with a different/alternative viral envelope glycoprotein; engineered with a cell type-specific receptor (e.g., genetic modification of the viral envelope glycoproteins to incorporate targeting ligands such as a peptide ligand, a single chain antibodie, a growth factor); and/or engineered to have a molecular bridge with dual specificities with one end recognizing a viral glycoprotein and the other end recognizing a moiety of the target cell surface (e.g., ligand-receptor, monoclonal antibody, avidin-biotin and chemical conjugation).

[1222] In an embodiment, the viral vector achieves cell type specific expression. For example, a tissue-specific promoter can be constructed to restrict expression of the transgene (Cas 9 and gRNA) in only the target cell. The specificity of the vector can also be mediated by microRNA-dependent control of transgene expression. In an embodiment, the viral vector has increased efficiency of fusion of the viral vector and a target cell membrane. For example, a fusion protein such as fusion-competent hemagglutin (HA) can be incorporated to increase viral uptake into cells. In an embodiment, the viral vector has the ability of nuclear localization. For example, aviruse that requires the breakdown of the cell wall (during cell division) and therefore will not infect a non-diving cell can be altered to incorporate a nuclear localization peptide in the matrix protein of the virus thereby enabling the transduction of non-proliferating cells.

[1223] In some embodiments, the Cas9- and/or gRNA-encoding DNA is delivered by a non-vector based method (e.g., using naked DNA or DNA complexes). For example, the DNA can be delivered, e.g., by organically modified silica or silicate (Ormosil), electroporation, gene gun, sonoporation, magnetofection, lipid-mediated transfection, dendrimers, inorganic nanoparticles, calcium phosphates, or a combination thereof.

[1224] In some embodiments, the Cas9- and/or gRNA-encoding DNA is delivered by a combination of a vector and a non-vector based method. For example, virosomes combine liposomes with an inactivated virus (e.g., HIV or influenza virus), which can result in more efficient gene transfer, e.g., in respiratory epithelial cells than either viral or liposomal methods alone.

[1225] In an embodiment, the delivery vehicle is a non-viral vector. In an embodiment, the non-viral vector is an inorganic nanoparticle. Exemplary inorganic nanoparticles include, e.g., magnetic nanoparticles (e.g., Fe₃MnO₂) or silica. The outer surface of the nanoparticle can be conjugated with a positively charged polymer (e.g., polyethylenimine, polylysine, polyserine) which allows for attachment (e.g., conjugation or entrapment) of payload. In an embodiment, the non-viral vector is an organic nanoparticle (e.g., entrapment of the payload inside the nanoparticle). Exemplary organic nanoparticles include, e.g., SNALP liposomes that contain cationic lipids together with neutral helper lipids which are coated with polyethylene glycol (PEG) and protamine and nucleic acid complex coated with lipid coating.

[1226] Exemplary lipids for gene transfer are shown below in Table 16.

TABLE 16
Lipids Used for Gene Transfer

| Lipid | Abbreviation | Feature |
|---|---|---|
| 1,2-Dioleoyl-sn-glycero-3-phosphatidylcholine | DOPC | Helper |
| 1,2-Dioleoyl-sn-glycero-3-phosphatidylethanolamine | DOPE | Helper |
| Cholesterol | | Helper |
| N-[1-(2,3-Dioleyloxy)prophyl]N,N,N-trimethylammonium | DOTMA | Cationic |
| chloride | | |
| 1,2-Dioleoyloxy-3-trimethylammonium-propane | DOTAP | Cationic |
| Dioctadecylamidoglycylspermine | DOGS | Cationic |
| N-(3-Aminopropyl)-N,N-dimethyl-2,3-bis(dodecyloxy)-1- | GAP-DLRIE | Cationic |
| propanaminium bromide | | |
| Cetyltrimethylammonium bromide | CTAB | Cationic |
| 6-Lauroxyhexyl ornithinate | LHON | Cationic |
| 1-(2,3-Dioleoyloxypropyl)-2,4,6-trimethylpyridinium | 2Oc | Cationic |
| 2,3-Dioleyloxy-N-[2(sperminecarboxamido-ethyl]-N,N-dimethyl- | DOSPA | Cationic |
| 1-propanaminium trifluoroacetate | | |
| 1,2-Dioleyl-3-trimethylammonium-propane | DOPA | Cationic |
| N-(2-Hydroxyethyl)-N,N-dimethyl-2,3-bis(tetradecyloxy)-1- | MDRIE | Cationic |
| propanaminium bromide | | |
| Dimyristooxypropyl dimethyl hydroxyethyl ammonium bromide | DMRI | Cationic |
| 3β-[N-(N′,N′-Dimethylaminoethane)-carbamoyl]cholesterol | DC-Chol | Cationic |
| Bis-guanidium-tren-cholesterol | BGTC | Cationic |
| 1,3-Diodeoxy-2-(6-carboxy-spermyl)-propylamide | DOSPER | Cationic |
| Dimethyloctadecylammonium bromide | DDAB | Cationic |
| Dioctadecylamidoglicylspermidin | DSL | Cationic |
| rac-[(2,3-Dioctadecyloxypropyl)(2-hydroxyethyl)]- | CLIP-1 | Cationic |
| dimethylammonium chloride | | |
| rac-[2(2,3-Dihexadecyloxypropyl- | CLIP-6 | Cationic |
| oxymethyloxy)ethyl]trimethylammonium bromide | | |
| Ethyldimyristoylphosphatidylcholine | EDMPC | Cationic |
| 1,2-Distearyloxy-N,N-dimethyl-3-aminopropane | DSDMA | Cationic |
| 1,2-Dimyristoyl-trimethylammonium propane | DMTAP | Cationic |
| O,O′-Dimyristyl-N-lysyl aspartate | DMKE | Cationic |
| 1,2-Distearoyl-sn-glycero-3-ethylphosphocholine | DSEPC | Cationic |
| N-Palmitoyl D-erythro-sphingosyl carbamoyl-spermine | CCS | Cationic |
| N-t-Butyl-N0-tetradecyl-3-tetradecylaminopropionamidine | diC14-amidine | Cationic |
| Octadecenolyoxy[ethyl-2-heptadecenyl-3 hydroxyethyl] | DOTIM | Cationic |
| imidazolinium chloride | | |
| N1-Cholesteryloxycarbonyl-3,7-diazanonane-1,9-diamine | CDAN | Cationic |
| 2-(3-[Bis(3-amino-propyl)-amino]propylamino)-N- | RPR209120 | Cationic |
| ditetradecylcarbamoylme-ethyl-acetamide | | |
| 1,2-dilinoleyloxy-3-dimethylaminopropane | DLinDMA | Cationic |
| 2,2-dilinoleyl-4-dimethylaminoethyl-[1,3]- dioxolane | DLin-KC2- | Cationic |
| | DMA | |
| dilinoleyl-methyl-4-dimethylaminobutyrate | DLin-MC3- | Cationic |
| | DMA | |

[1227] Exemplary polymers for gene transfer are shown below in Table 17.

TABLE 17
Polymers Used for Gene Transfer

| Polymer | Abbreviation |
|---|---|
| Poly(ethylene)glycol | PEG |
| Polyethylenimine | PEI |
| Dithiobis(succinimidylpropionate) | DSP |
| Dimethyl-3,3′-dithiobispropionimidate | DTBP |
| Poly(ethylene imine) biscarbamate | PEIC |
| Poly(L-lysine) | PLL |
| Histidine modified PLL | |
| Poly(N-vinylpyrrolidone) | PVP |
| Poly(propylenimine) | PPI |
| Poly(amidoamine) | PAMAM |
| Poly(amido ethylenimine) | SS-PAEI |
| Triethylenetetramine | TETA |
| Poly(β-aminoester) | |
| Poly(4-hydroxy-L-proline ester) | PHP |
| Poly(allylamine) | |
| Poly(α-[4-aminobutyl]-L-glycolic acid) | PAGA |
| Poly(D,L-lactic-co-glycolic acid) | PLGA |
| Poly(N-ethyl-4-vinylpyridinium bromide) | |
| Poly(phosphazene)s | PPZ |
| Poly(phosphoester)s | PPE |
| Poly(phosphoramidate)s | PPA |
| Poly(N-2-hydroxypropylmethacrylamide) | pHPMA |
| Poly (2-(dimethylamino)ethyl methacrylate) | pDMAEMA |
| Poly(2-aminoethyl propylene phosphate) | PPE-EA |
| Chitosan | |
| Galactosylated chitosan | |
| N-Dodacylated chitosan | |
| Histone | |
| Collagen | |
| Dextran-spermine | D-SPM |

[1228] In an embodiment, the vehicle has targeting modifications to increase target cell update of nanoparticles and liposomes, e.g., cell specific antigens, monoclonal antibodies, single chain antibodies, aptamers, polymers, sugars (e.g., N-acetylgalactosamine (GalNAc)), and cell penetrating peptides. In an embodiment, the vehicle uses fusogenic and endosome-destabilizing peptides/polymers. In an embodiment, the vehicle undergoes acid-triggered conformational changes (e.g., to accelerate endosomal escape of the cargo). In an embodiment, a stimuli-cleavable polymer is used, e.g., for release in a cellular compartment. For example, disulfide-based cationic polymers that are cleaved in the reducing cellular environment can be used.

[1229] In an embodiment, the delivery vehicle is a biological non-viral delivery vehicle. In an embodiment, the vehicle is an attenuated bacterium (e.g., naturally or artificially engineered to be invasive but attenuated to prevent pathogenesis and expressing the transgene (e.g., Listeria monocytogenes, certain Salmonella strains, Bifidobacterium longum, and modified Escherichia coli), bacteria having nutritional and tissue-specific tropism to target specific tissues, bacteria having modified surface proteins to alter target tissue specificity). In an embodiment, the vehicle is a genetically modified bacteriophage (e.g., engineered phages having large packaging capacity, less immunogenic, containing mammalian plasmid maintenance sequences and having incorporated targeting ligands). In an embodiment, the vehicle is a mammalian virus-like particle. For example, modified viral particles can be generated (e.g., by purification of the “empty” particles followed by ex vivo assembly of the virus with the desired cargo). The vehicle can also be engineered to incorporate targeting ligands to alter target tissue specificity. In an embodiment, the vehicle is a biological liposome. For example, the biological liposome is a phospholipid-based particle derived from human cells (e.g., erythrocyte ghosts, which are red blood cells broken down into spherical structures derived from the subject (e.g., tissue targeting can be achieved by attachment of various tissue or cell-specific ligands), or secretory exosomes—subject (i.e., patient) derived membrane-bound nanovescicle (30-100 nm) of endocytic origin (e.g., can be produced from various cell types and can therefore be taken up by cells without the need of for targeting ligands).

[1230] In an embodiment, one or more nucleic acid molecules (e.g., DNA molecules) other than the components of a Cas system, e.g., the Cas9 molecule component and/or the gRNA molecule component described herein, are delivered. In an embodiment, the nucleic acid molecule is delivered at the same time as one or more of the components of the Cas system are delivered. In an embodiment, the nucleic acid molecule is delivered before or after (e.g., less than about 30 minutes, 1 hour, 2 hours, 3 hours, 6 hours, 9 hours, 12 hours, 1 day, 2 days, 3 days, 1 week, 2 weeks, or 4 weeks) one or more of the components of the Cas system are delivered. In an embodiment, the nucleic acid molecule is delivered by a different means than one or more of the components of the Cas system, e.g., the Cas9 molecule component and/or the gRNA molecule component, are delivered. The nucleic acid molecule can be delivered by any of the delivery methods described herein. For example, the nucleic acid molecule can be delivered by a viral vector, e.g., an integration-deficient lentivirus, and the Cas9 molecule component and/or the gRNA molecule component can be delivered by electroporation, e.g., such that the toxicity caused by nucleic acids (e.g., DNAs) can be reduced. In an embodiment, the nucleic acid molecule encodes a therapeutic protein, e.g., a protein described herein. In an embodiment, the nucleic acid molecule encodes an RNA molecule, e.g., an RNA molecule described herein.

[1231] Delivery of RNA Encoding a Cas9 Molecule

[1232] RNA encoding Cas9 molecules (e.g., eaCas9 molecules, eiCas9 molecules or eiCas9 fusion proteins) and/or gRNA molecules, can be delivered into cells by art-known methods or as described herein. For example, Cas9-encoding and/or gRNA-encoding RNA can be delivered, e.g., by microinjection, electroporation, lipid-mediated transfection, peptide-mediated delivery, or a combination thereof. Cas9-encoding and/or gRNA-encoding RNA can be conjugated to molecules (e.g., GalNAc) promoting uptake by the target cells (e.g., target cells described herein).

[1233] Delivery Cas9 Molecule Protein

[1234] Cas9 molecules (e.g., eaCas9 molecules, eiCas9 molecules or eiCas9 fusion proteins) can be delivered into cells by art-known methods or as described herein. For example, Cas9 protein molecules can be delivered, e.g., by microinjection, electroporation, lipid-mediated transfection, peptide-mediated delivery, or a combination thereof. Delivery can be accompanied by DNA encoding a gRNA or by a gRNA. Delivery can be accompanied by a donor template. Cas9 protein can be conjugated to molecules (e.g., GalNAc) promoting uptake by the target cells (e.g., target cells described herein).

[1235] Route of Administration

[1236] Systemic modes of administration include oral and parenteral routes. Parenteral routes include, by way of example, intravenous, intrarterial, intramuscular, intradermal, subcutaneous, intranasal, and intraperitoneal routes. Components administered systemically may be modified or formulated to target the components to the eye or inner ear.

[1237] Local modes of administration include, by way of example, intraocular, intraorbital, subconjuctival, intravitreal, subretinal, transscleral or introcochlear routes. In an embodiment, significantly smaller amounts of the components (compared with systemic approaches) may exert an effect when administered locally (for example, intravitreally) compared to when administered systemically (for example, intravenously). Local modes of administration can reduce or eliminate the incidence of potentially toxic side effects that may occur when therapeutically effective amounts of a component are administered systemically.

[1238] In an embodiment, components described herein are delivered subretinally, e.g., by subretinal injection. Subretinal injections may be made directly into the macular, e.g., submacular injection.

[1239] In an embodiment, components described herein are delivered by intravitreal injection. Intravitreal injection has a relatively low risk of retinal detachment. In an embodiment, nanoparticle or viral, e.g., AAV vector, is delivered intravitreally.

[1240] In an embodiment, components described herein are delivered into the inner ear, e.g., by intracochlear injection. Intracochlear injections may be made in the vicinity of inner and/or outer hair cells.

[1241] Methods for administration of agents to the eye and inner ear are known in the medical arts and can be used to administer components described herein. Exemplary methods include intraocular injection (e.g., retrobulbar, subretinal, submacular, intravitreal and intrachoridal), iontophoresis, eye drops, intraocular implantation (e.g., intravitreal, sub-Tenons and sub-conjunctival) and intracochlear injection.

[1242] Administration may be provided as a periodic bolus (for example, subretinally, intravenously, intravitreally or by intracochlear injection) or as continuous infusion from an internal reservoir (for example, from an implant disposed at an intra- or extra-ocular location (see, U.S. Pat. Nos. 5,443,505 and 5,766,242)) or from an external reservoir (for example, from an intravenous bag). Components may be administered locally, for example, by continuous release from a sustained release drug delivery device immobilized to an inner wall of the eye or via targeted transscleral controlled release into the choroid (see, for example, PCT/US00/00207, PCT/US02/14279, Ambati et al. (2000) INVEST. OPHTHALMOL. VIS. SCI.41:1181-1185, and Ambati et al. (2000) INVEST. OPHTHALMOL. VIS. SCI.41:1186-1191). A variety of devices suitable for administering components locally to the inside of the eye are known in the art. See, for example, U.S. Pat. Nos. 6,251,090, 6,299,895, 6,416,777, 6,413,540, and PCT/US00/28187.

[1243] In addition, components may be formulated to permit release over a prolonged period of time. A release system can include a matrix of a biodegradable material or a material which releases the incorporated components by diffusion. The components can be homogeneously or heterogeneously distributed within the release system. A variety of release systems may be useful, however, the choice of the appropriate system will depend upon rate of release required by a particular application. Both non-degradable and degradable release systems can be used. Suitable release systems include polymers and polymeric matrices, non-polymeric matrices, or inorganic and organic excipients and diluents such as, but not limited to, calcium carbonate and sugar (for example, trehalose). Release systems may be natural or synthetic. However, synthetic release systems are preferred because generally they are more reliable, more reproducible and produce more defined release profiles. The release system material can be selected so that components having different molecular weights are released by diffusion through or degradation of the material.

[1244] Representative synthetic, biodegradable polymers include, for example: polyamides such as poly(amino acids) and poly(peptides); polyesters such as poly(lactic acid), poly(glycolic acid), poly(lactic-co-glycolic acid), and poly(caprolactone); poly(anhydrides); polyorthoesters; polycarbonates; and chemical derivatives thereof (substitutions, additions of chemical groups, for example, alkyl, alkylene, hydroxylations, oxidations, and other modifications routinely made by those skilled in the art), copolymers and mixtures thereof. Representative synthetic, non-degradable polymers include, for example: polyethers such as poly(ethylene oxide), poly(ethylene glycol), and poly(tetramethylene oxide); vinyl polymers-polyacrylates and polymethacrylates such as methyl, ethyl, other alkyl, hydroxyethyl methacrylate, acrylic and methacrylic acids, and others such as poly(vinyl alcohol), poly(vinyl pyrolidone), and poly(vinyl acetate); poly(urethanes); cellulose and its derivatives such as alkyl, hydroxyalkyl, ethers, esters, nitrocellulose, and various cellulose acetates; polysiloxanes; and any chemical derivatives thereof (substitutions, additions of chemical groups, for example, alkyl, alkylene, hydroxylations, oxidations, and other modifications routinely made by those skilled in the art), copolymers and mixtures thereof.

[1245] Poly(lactide-co-glycolide) microsphere can also be used for intraocular injection. Typically the microspheres are composed of a polymer of lactic acid and glycolic acid, which are structured to form hollow spheres. The spheres can be approximately 15-30 microns in diameter and can be loaded with components described herein.

[1246] Bi-Modal or Differential Delivery of Components

[1247] Separate delivery of the components of a Cas system, e.g., the Cas9 molecule component and the gRNA molecule component, and more particularly, delivery of the components by differing modes, can enhance performance, e.g., by improving tissue specificity and safety.

[1248] In an embodiment, the Cas9 molecule and the gRNA molecule are delivered by different modes, or as sometimes referred to herein as differential modes. Different or differential modes, as used herein, refer modes of delivery that confer different pharmacodynamic or pharmacokinetic properties on the subject component molecule, e.g., a Cas9 molecule, gRNA molecule, template nucleic acid, or payload. For example, the modes of delivery can result in different tissue distribution, different half-life, or different temporal distribution, e.g., in a selected compartment, tissue, or organ.

[1249] Some modes of delivery, e.g., delivery by a nucleic acid vector that persists in a cell, or in progeny of a cell, e.g., by autonomous replication or insertion into cellular nucleic acid, result in more persistent expression of and presence of a component. Examples include viral, e.g., adeno associated virus or lentivirus, delivery.

[1250] By way of example, the components, e.g., a Cas9 molecule and a gRNA molecule, can be delivered by modes that differ in terms of resulting half-life or persistent of the delivered component the body, or in a particular compartment, tissue or organ. In an embodiment, a gRNA molecule can be delivered by such modes. The Cas9 molecule component can be delivered by a mode which results in less persistence or less exposure to the body or a particular compartment or tissue or organ.

[1251] More generally, in an embodiment, a first mode of delivery is used to deliver a first component and a second mode of delivery is used to deliver a second component. The first mode of delivery confers a first pharmacodynamic or pharmacokinetic property. The first pharmacodynamic property can be, e.g., distribution, persistence, or exposure, of the component, or of a nucleic acid that encodes the component, in the body, a compartment, tissue or organ. The second mode of delivery confers a second pharmacodynamic or pharmacokinetic property. The second pharmacodynamic property can be, e.g., distribution, persistence, or exposure, of the component, or of a nucleic acid that encodes the component, in the body, a compartment, tissue or organ.

[1252] In an embodiment, the first pharmacodynamic or pharmacokinetic property, e.g., distribution, persistence or exposure, is more limited than the second pharmacodynamic or pharmacokinetic property.

[1253] In an embodiment, the first mode of delivery is selected to optimize, e.g., minimize, a pharmacodynamic or pharmacokinetic property, e.g., distribution, persistence or exposure.

[1254] In an embodiment, the second mode of delivery is selected to optimize, e.g., maximize, a pharmacodynamic or pharmacokinetic property, e.g., distribution, persistence or exposure.

[1255] In an embodiment, the first mode of delivery comprises the use of a relatively persistent element, e.g., a nucleic acid, e.g., a plasmid or viral vector, e.g., an AAV or lentivirus. As such vectors are relatively persistent product transcribed from them would be relatively persistent.

[1256] In an embodiment, the second mode of delivery comprises a relatively transient element, e.g., an RNA or protein.

[1257] In an embodiment, the first component comprises gRNA, and the delivery mode is relatively persistent, e.g., the gRNA is transcribed from a plasmid or viral vector, e.g., an AAV or lentivirus. Transcription of these genes would be of little physiological consequence because the genes do not encode for a protein product, and the gRNAs are incapable of acting in isolation. The second component, a Cas9 molecule, is delivered in a transient manner, for example as mRNA or as protein, ensuring that the full Cas9 molecule/gRNA molecule complex is only present and active for a short period of time.

[1258] Furthermore, the components can be delivered in different molecular form or with different delivery vectors that complement one another to enhance safety and tissue specificity.

[1259] Use of differential delivery modes can enhance performance, safety and efficacy. E.g., the likelihood of an eventual off-target modification can be reduced. Delivery of immunogenic components, e.g., Cas9 molecules, by less persistent modes can reduce immunogenicity, as peptides from the bacterially-derived Cas enzyme are displayed on the surface of the cell by MHC molecules. A two-part delivery system can alleviate these drawbacks.

[1260] Differential delivery modes can be used to deliver components to different, but overlapping target regions. The formation active complex is minimized outside the overlap of the target regions. Thus, in an embodiment, a first component, e.g., a gRNA molecule is delivered by a first delivery mode that results in a first spatial, e.g., tissue, distribution. A second component, e.g., a Cas9 molecule is delivered by a second delivery mode that results in a second spatial, e.g., tissue, distribution. In an embodiment the first mode comprises a first element selected from a liposome, nanoparticle, e.g., polymeric nanoparticle, and a nucleic acid, e.g., viral vector. The second mode comprises a second element selected from the group. In an embodiment, the first mode of delivery comprises a first targeting element, e.g., a cell specific receptor or an antibody, and the second mode of delivery does not include that element. In embodiment, the second mode of delivery comprises a second targeting element, e.g., a second cell specific receptor or second antibody.

[1261] When the Cas9 molecule is delivered in a virus delivery vector, a liposome, or polymeric nanoparticle, there is the potential for delivery to and therapeutic activity in multiple tissues, when it may be desirable to only target a single tissue. A two-part delivery system can resolve this challenge and enhance tissue specificity. If the gRNA molecule and the Cas9 molecule are packaged in separated delivery vehicles with distinct but overlapping tissue tropism, the fully functional complex is only be formed in the tissue that is targeted by both vectors.

### Ex Vivo Delivery

[1262] In some embodiments, components described in Table 14 are introduced into cells which are then introduced into the subject. Methods of introducing the components can include, e.g., any of the delivery methods described in Table 15.

### VIII. Modified Nucleosides, Nucleotides, and Nucleic Acids

[1263] Modified nucleosides and modified nucleotides can be present in nucleic acids, e.g., particularly gRNA, but also other forms of RNA, e.g., mRNA, RNAi, or siRNA. As described herein, “nucleoside” is defined as a compound containing a five-carbon sugar molecule (a pentose or ribose) or derivative thereof, and an organic base, purine or pyrimidine, or a derivative thereof. As described herein, “nucleotide” is defined as a nucleoside further comprising a phosphate group.

[1264] Modified nucleosides and nucleotides can include one or more of:

[1265] (i) alteration, e.g., replacement, of one or both of the non-linking phosphate oxygens and/or of one or more of the linking phosphate oxygens in the phosphodiester backbone linkage;

[1266] (ii) alteration, e.g., replacement, of a constituent of the ribose sugar, e.g., of the 2′ hydroxyl on the ribose sugar;

[1267] (iii) wholesale replacement of the phosphate moiety with “dephospho” linkers;

[1268] (iv) modification or replacement of a naturally occurring nucleobase;

[1269] (v) replacement or modification of the ribose-phosphate backbone;

[1270] (vi) modification of the 3′ end or 5′ end of the oligonucleotide, e.g., removal, modification or replacement of a terminal phosphate group or conjugation of a moiety; and

[1271] (vii) modification of the sugar.

[1272] The modifications listed above can be combined to provide modified nucleosides and nucleotides that can have two, three, four, or more modifications. For example, a modified nucleoside or nucleotide can have a modified sugar and a modified nucleobase. In an embodiment, every base of a gRNA is modified, e.g., all bases have a modified phosphate group, e.g., all are phosphorothioate groups. In an embodiment, all, or substantially all, of the phosphate groups of a unimolecular or modular gRNA molecule are replaced with phosphorothioate groups.

[1273] In an embodiment, modified nucleotides, e.g., nucleotides having modifications as described herein, can be incorporated into a nucleic acid, e.g., a “modified nucleic acid.” In some embodiments, the modified nucleic acids comprise one, two, three or more modified nucleotides. In some embodiments, at least 5% (e.g., at least about 5%, at least about 10%, at least about 15%, at least about 20%, at least about 25%, at least about 30%, at least about 35%, at least about 40%, at least about 45%, at least about 50%, at least about 55%, at least about 60%, at least about 65%, at least about 70%, at least about 75%, at least about 80%, at least about 85%, at least about 90%, at least about 95%, or about 100%) of the positions in a modified nucleic acid are a modified nucleotides.

[1274] Unmodified nucleic acids can be prone to degradation by, e.g., cellular nucleases. For example, nucleases can hydrolyze nucleic acid phosphodiester bonds. Accordingly, in one aspect the modified nucleic acids described herein can contain one or more modified nucleosides or nucleotides, e.g., to introduce stability toward nucleases.

[1275] In some embodiments, the modified nucleosides, modified nucleotides, and modified nucleic acids described herein can exhibit a reduced innate immune response when introduced into a population of cells, both in vivo and ex vivo. The term “innate immune response” includes a cellular response to exogenous nucleic acids, including single stranded nucleic acids, generally of viral or bacterial origin, which involves the induction of cytokine expression and release, particularly the interferons, and cell death. In some embodiments, the modified nucleosides, modified nucleotides, and modified nucleic acids described herein can disrupt binding of a major groove interacting partner with the nucleic acid. In some embodiments, the modified nucleosides, modified nucleotides, and modified nucleic acids described herein can exhibit a reduced innate immune response when introduced into a population of cells, both in vivo and ex vivo, and also disrupt binding of a major groove interacting partner with the nucleic acid.

### Definitions of Chemical Groups

[1276] As used herein, “alkyl” is meant to refer to a saturated hydrocarbon group which is straight-chained or branched. Example alkyl groups include methyl (Me), ethyl (Et), propyl (e.g., n-propyl and isopropyl), butyl (e.g., n-butyl, isobutyl, t-butyl), pentyl (e.g., n-pentyl, isopentyl, neopentyl), and the like. An alkyl group can contain from 1 to about 20, from 2 to about 20, from 1 to about 12, from 1 to about 8, from 1 to about 6, from 1 to about 4, or from 1 to about 3 carbon atoms.

[1277] As used herein, “aryl” refers to monocyclic or polycyclic (e.g., having 2, 3 or 4 fused rings) aromatic hydrocarbons such as, for example, phenyl, naphthyl, anthracenyl, phenanthrenyl, indanyl, indenyl, and the like. In some embodiments, aryl groups have from 6 to about 20 carbon atoms.

[1278] As used herein, “alkenyl” refers to an aliphatic group containing at least one double bond.

[1279] As used herein, “alkynyl” refers to a straight or branched hydrocarbon chain containing 2-12 carbon atoms and characterized in having one or more triple bonds. Examples of alkynyl groups include, but are not limited to, ethynyl, propargyl, and 3-hexynyl.

[1280] As used herein, “arylalkyl” or “aralkyl” refers to an alkyl moiety in which an alkyl hydrogen atom is replaced by an aryl group. Aralkyl includes groups in which more than one hydrogen atom has been replaced by an aryl group. Examples of “arylalkyl” or “aralkyl” include benzyl, 2-phenylethyl, 3-phenylpropyl, 9-fluorenyl, benzhydryl, and trityl groups.

[1281] As used herein, “cycloalkyl” refers to a cyclic, bicyclic, tricyclic, or polycyclic non-aromatic hydrocarbon groups having 3 to 12 carbons. Examples of cycloalkyl moieties include, but are not limited to, cyclopropyl, cyclopentyl, and cyclohexyl.

[1282] As used herein, “heterocyclyl” refers to a monovalent radical of a heterocyclic ring system. Representative heterocyclyls include, without limitation, tetrahydrofuranyl, tetrahydrothienyl, pyrrolidinyl, pyrrolidonyl, piperidinyl, pyrrolinyl, piperazinyl, dioxanyl, dioxolanyl, diazepinyl, oxazepinyl, thiazepinyl, and morpholinyl.

[1283] As used herein, “heteroaryl” refers to a monovalent radical of a heteroaromatic ring system. Examples of heteroaryl moieties include, but are not limited to, imidazolyl, oxazolyl, thiazolyl, triazolyl, pyrrolyl, furanyl, indolyl, thiophenyl pyrazolyl, pyridinyl, pyrazinyl, pyridazinyl, pyrimidinyl, indolizinyl, purinyl, naphthyridinyl, quinolyl, and pteridinyl.

### Phosphate Backbone Modifications

[1284] The Phosphate Group

[1285] In some embodiments, the phosphate group of a modified nucleotide can be modified by replacing one or more of the oxygens with a different substituent. Further, the modified nucleotide, e.g., modified nucleotide present in a modified nucleic acid, can include the wholesale replacement of an unmodified phosphate moiety with a modified phosphate as described herein. In some embodiments, the modification of the phosphate backbone can include alterations that result in either an uncharged linker or a charged linker with unsymmetrical charge distribution.

[1286] Examples of modified phosphate groups include, phosphorothioate, phosphoroselenates, borano phosphates, borano phosphate esters, hydrogen phosphonates, phosphoroamidates, alkyl or aryl phosphonates and phosphotriesters. In some embodiments, one of the non-bridging phosphate oxygen atoms in the phosphate backbone moiety can be replaced by any of the following groups: sulfur (S), selenium (Se), BR₃ (wherein R can be, e.g., hydrogen, alkyl, or aryl), C (e.g., an alkyl group, an aryl group, and the like), H, NR₂ (wherein R can be, e.g., hydrogen, alkyl, or aryl), or OR (wherein R can be, e.g., alkyl or aryl). The phosphorous atom in an unmodified phosphate group is achiral. However, replacement of one of the non-bridging oxygens with one of the above atoms or groups of atoms can render the phosphorous atom chiral; that is to say that a phosphorous atom in a phosphate group modified in this way is a stereogenic center. The stereogenic phosphorous atom can possess either the “R” configuration (herein Rp) or the “S” configuration (herein Sp).

[1287] Phosphorodithioates have both non-bridging oxygens replaced by sulfur. The phosphorus center in the phosphorodithioates is achiral which precludes the formation of oligoribonucleotide diastereomers. In some embodiments, modifications to one or both non-bridging oxygens can also include the replacement of the non-bridging oxygens with a group independently selected from S, Se, B, C, H, N, and OR (R can be, e.g., alkyl or aryl).

[1288] The phosphate linker can also be modified by replacement of a bridging oxygen, (i.e., the oxygen that links the phosphate to the nucleoside), with nitrogen (bridged phosphoroamidates), sulfur (bridged phosphorothioates) and carbon (bridged methylenephosphonates). The replacement can occur at either linking oxygen or at both of the linking oxygens.

[1289] Replacement of the Phosphate Group

[1290] The phosphate group can be replaced by non-phosphorus containing connectors. In some embodiments, the charge phosphate group can be replaced by a neutral moiety.

[1291] Examples of moieties which can replace the phosphate group can include, without limitation, e.g., methyl phosphonate, hydroxylamino, siloxane, carbonate, carboxymethyl, carbamate, amide, thioether, ethylene oxide linker, sulfonate, sulfonamide, thioformacetal, formacetal, oxime, methyleneimino, methylenemethylimino, methylenehydrazo, methylenedimethylhydrazo and methyleneoxymethylimino.

[1292] Replacement of the Ribophosphate Backbone

[1293] Scaffolds that can mimic nucleic acids can also be constructed wherein the phosphate linker and ribose sugar are replaced by nuclease resistant nucleoside or nucleotide surrogates. In some embodiments, the nucleobases can be tethered by a surrogate backbone. Examples can include, without limitation, the morpholino, cyclobutyl, pyrrolidine and peptide nucleic acid (PNA) nucleoside surrogates.

### Sugar Modifications

[1294] The modified nucleosides and modified nucleotides can include one or more modifications to the sugar group. For example, the 2′ hydroxyl group (OH) can be modified or replaced with a number of different “oxy” or “deoxy” substituents. In some embodiments, modifications to the 2′ hydroxyl group can enhance the stability of the nucleic acid since the hydroxyl can no longer be deprotonated to form a 2′-alkoxide ion. The 2′-alkoxide can catalyze degradation by intramolecular nucleophilic attack on the linker phosphorus atom.

[1295] Examples of “oxy”-2′ hydroxyl group modifications can include alkoxy or aryloxy (OR, wherein “R” can be, e.g., alkyl, cycloalkyl, aryl, aralkyl, heteroaryl or a sugar); polyethyleneglycols (PEG), O(CH₂CH₂O)ₙCH₂CH₂OR wherein R can be, e.g., H or optionally substituted alkyl, and n can be an integer from 0 to 20 (e.g., from 0 to 4, from 0 to 8, from 0 to 10, from 0 to 16, from 1 to 4, from 1 to 8, from 1 to 10, from 1 to 16, from 1 to 20, from 2 to 4, from 2 to 8, from 2 to 10, from 2 to 16, from 2 to 20, from 4 to 8, from 4 to 10, from 4 to 16, and from 4 to 20). In some embodiments, the “oxy”-2′ hydroxyl group modification can include “locked” nucleic acids (LNA) in which the 2′ hydroxyl can be connected, e.g., by a C₁₋₆ alkylene or C₁₋₆ heteroalkylene bridge, to the 4′ carbon of the same ribose sugar, where exemplary bridges can include methylene, propylene, ether, or amino bridges; O-amino (wherein amino can be, e.g., NH₂; alkylamino, dialkylamino, heterocyclyl, arylamino, diarylamino, heteroarylamino, or diheteroarylamino, ethylenediamine, or polyamino) and aminoalkoxy, O(CH₂)ₙ-amino, (wherein amino can be, e.g., NH₂; alkylamino, dialkylamino, heterocyclyl, arylamino, diarylamino, heteroarylamino, or diheteroarylamino, ethylenediamine, or polyamino). In some embodiments, the “oxy”-2′ hydroxyl group modification can include the methoxyethyl group (MOE), (OCH₂CH₂OCH₃, e.g., a PEG derivative).

[1296] “Deoxy” modifications can include hydrogen (i.e. deoxyribose sugars, e.g., at the overhang portions of partially ds RNA); halo (e.g., bromo, chloro, fluoro, or iodo); amino (wherein amino can be, e.g., NH₂; alkylamino, dialkylamino, heterocyclyl, arylamino, diarylamino, heteroarylamino, diheteroarylamino, or amino acid); NH(CH₂CH₂NH)ₙCH₂CH₂-amino (wherein amino can be, e.g., as described herein), —NHC(O)R (wherein R can be, e.g., alkyl, cycloalkyl, aryl, aralkyl, heteroaryl or sugar), cyano; mercapto; alkyl-thio-alkyl; thioalkoxy; and alkyl, cycloalkyl, aryl, alkenyl and alkynyl, which may be optionally substituted with e.g., an amino as described herein.

[1297] The sugar group can also contain one or more carbons that possess the opposite stereochemical configuration than that of the corresponding carbon in ribose. Thus, a modified nucleic acid can include nucleotides containing e.g., arabinose, as the sugar. The nucleotide “monomer” can have an alpha linkage at the 1′ position on the sugar, e.g., alpha-nucleosides. The modified nucleic acids can also include “abasic” sugars, which lack a nucleobase at C-1′. These abasic sugars can also be further modified at one or more of the constituent sugar atoms. The modified nucleic acids can also include one or more sugars that are in the L form, e.g. L-nucleosides.

[1298] Generally, RNA includes the sugar group ribose, which is a 5-membered ring having an oxygen. Exemplary modified nucleosides and modified nucleotides can include, without limitation, replacement of the oxygen in ribose (e.g., with sulfur (S), selenium (Se), or alkylene, such as, e.g., methylene or ethylene); addition of a double bond (e.g., to replace ribose with cyclopentenyl or cyclohexenyl); ring contraction of ribose (e.g., to form a 4-membered ring of cyclobutane or oxetane); ring expansion of ribose (e.g., to form a 6- or 7-membered ring having an additional carbon or heteroatom, such as for example, anhydrohexitol, altritol, mannitol, cyclohexanyl, cyclohexenyl, and morpholino that also has a phosphoramidate backbone). In some embodiments, the modified nucleotides can include multicyclic forms (e.g., tricyclo; and “unlocked” forms, such as glycol nucleic acid (GNA) (e.g., R-GNA or S-GNA, where ribose is replaced by glycol units attached to phosphodiester bonds), threose nucleic acid (TNA, where ribose is replaced with α-L-threofuranosyl-(3′→2′)).

### Modifications on the Nucleobase

[1299] The modified nucleosides and modified nucleotides described herein, which can be incorporated into a modified nucleic acid, can include a modified nucleobase. Examples of nucleobases include, but are not limited to, adenine (A), guanine (G), cytosine (C), and uracil (U). These nucleobases can be modified or wholly replaced to provide modified nucleosides and modified nucleotides that can be incorporated into modified nucleic acids. The nucleobase of the nucleotide can be independently selected from a purine, a pyrimidine, a purine or pyrimidine analog. In some embodiments, the nucleobase can include, for example, naturally-occurring and synthetic derivatives of a base.

[1300] Uracil

[1301] In some embodiments, the modified nucleobase is a modified uracil. Exemplary nucleobases and nucleosides having a modified uracil include without limitation pseudouridine (ψ), pyridin-4-one ribonucleoside, 5-aza-uridine, 6-aza-uridine, 2-thio-5-aza-uridine, 2-thio-uridine (s2U), 4-thio-uridine (s4U), 4-thio-pseudouridine, 2-thio-pseudouridine, 5-hydroxy-uridine (ho⁵U), 5-aminoallyl-uridine, 5-halo-uridine (e.g., 5-iodo-uridine or 5-bromo-uridine), 3-methyl-uridine (m³U), 5-methoxy-uridine (mo⁵U), uridine 5-oxyacetic acid (cmo⁵U), uridine 5-oxyacetic acid methyl ester (mcmo⁵U), 5-carboxymethyl-uridine (cm⁵U), 1-carboxymethyl-pseudouridine, 5-carboxyhydroxymethyl-uridine (chm⁵U), 5-carboxyhydroxymethyl-uridine methyl ester (mchm⁵U), 5-methoxycarbonylmethyl-uridine (mcm⁵U), 5-methoxycarbonylmethyl-2-thio-uridine (mcm⁵s2U), 5-aminomethyl-2-thio-uridine (nm⁵s2U), 5-methylaminomethyl-uridine (mnm⁵U), 5-methylaminomethyl-2-thio-uridine (mnm⁵s2U), 5-methylaminomethyl-2-seleno-uridine (mnm⁵se²U), 5-carbamoylmethyl-uridine (ncm⁵U), 5-carboxymethylaminomethyl-uridine (cmnm⁵U), 5-carboxymethylaminomethyl-2-thio-uridine (cmnm⁵s2U), 5-propynyl-uridine, 1-propynyl-pseudouridine, 5-taurinomethyl-uridine (τcm⁵U), 1-taurinomethyl-pseudouridine, 5-taurinomethyl-2-thio-uridine (τm⁵s2U), 1-taurinomethyl-4-thio-pseudouridine, 5-methyl-uridine (m⁵U, i.e., having the nucleobase deoxythymine), 1-methyl-pseudouridine (m¹ψ), 5-methyl-2-thio-uridine (m⁵s2U), 1-methyl-4-thio-pseudouridine (m¹s⁴ψ), 4-thio-1-methyl-pseudouridine, 3-methyl-pseudouridine (m³ψ), 2-thio-1-methyl-pseudouridine, 1-methyl-1-deaza-pseudouridine, 2-thio-1-methyl-1-deaza-pseudouridine, dihydrouridine (D), dihydropseudouridine, 5,6-dihydrouridine, 5-methyl-dihydrouridine (m⁵D), 2-thio-dihydrouridine, 2-thio-dihydropseudouridine, 2-methoxy-uridine, 2-methoxy-4-thio-uridine, 4-methoxy-pseudouridine, 4-methoxy-2-thio-pseudouridine, N1-methyl-pseudouridine, 3-(3-amino-3-carboxypropyl)uridine (acp³U), 1-methyl-3-(3-amino-3-carboxypropyl)pseudouridine (acp³ψ), 5-(isopentenylaminomethyl)uridine (inm⁵U), 5-(isopentenylaminomethyl)-2-thio-uridine (inm⁵s2U), α-thio-uridine, 2′-O-methyl-uridine (Urn), 5,2′-O-dimethyl-uridine (m⁵Um), 2′-O-methyl-pseudouridine (ψm), 2-thio-2′-O-methyl-uridine (s2Um), 5-methoxycarbonylmethyl-2′-O-methyl-uridine (mcm⁵Um), 5-carbamoylmethyl-2′-O-methyl-uridine (ncm⁵Um), 5-carboxymethylaminomethyl-2′-O-methyl-uridine (cmnm⁵Um), 3,2′-O-dimethyl-uridine (m³Um), 5-(isopentenylaminomethyl)-2′-O-methyl-uridine (inm⁵Um), 1-thio-uridine, deoxythymidine, 2′-F-ara-uridine, 2′-F-uridine, 2′-OH-ara-uridine, 5-(2-carbomethoxyvinyl) uridine, 5-[3-(1-E-propenylamino)uridine, pyrazolo[3,4-d]pyrimidines, xanthine, and hypoxanthine.

[1302] Cytosine

[1303] In some embodiments, the modified nucleobase is a modified cytosine. Exemplary nucleobases and nucleosides having a modified cytosine include without limitation 5-aza-cytidine, 6-aza-cytidine, pseudoisocytidine, 3-methyl-cytidine (m³C), N4-acetyl-cytidine (act), 5-formyl-cytidine (f⁵C), N4-methyl-cytidine (m⁴C), 5-methyl-cytidine (m⁵C), 5-halo-cytidine (e.g., 5-iodo-cytidine), 5-hydroxymethyl-cytidine (hm⁵C), 1-methyl-pseudoisocytidine, pyrrolo-cytidine, pyrrolo-pseudoisocytidine, 2-thio-cytidine (s2C), 2-thio-5-methyl-cytidine, 4-thio-pseudoisocytidine, 4-thio-1-methyl-pseudoisocytidine, 4-thio-1-methyl-1-deaza-pseudoisocytidine, 1-methyl-1-deaza-pseudoisocytidine, zebularine, 5-aza-zebularine, 5-methyl-zebularine, 5-aza-2-thio-zebularine, 2-thio-zebularine, 2-methoxy-cytidine, 2-methoxy-5-methyl-cytidine, 4-methoxy-pseudoisocytidine, 4-methoxy-1-methyl-pseudoisocytidine, lysidine (k²C), α-thio-cytidine, 2′-O-methyl-cytidine (Cm), 5,2′-O-dimethyl-cytidine (m⁵Cm), N4-acetyl-2′-O-methyl-cytidine (ac⁴Cm), N4,2′-O-dimethyl-cytidine (m⁴Cm), 5-formyl-2′-O-methyl-cytidine (f⁵Cm), N4,N4,2′-O-trimethyl-cytidine (m⁴₂Cm), 1-thio-cytidine, 2′-F-ara-cytidine, 2′-F-cytidine, and 2′-OH-ara-cytidine.

[1304] Adenine

[1305] In some embodiments, the modified nucleobase is a modified adenine. Exemplary nucleobases and nucleosides having a modified adenine include without limitation 2-amino-purine, 2,6-diaminopurine, 2-amino-6-halo-purine (e.g., 2-amino-6-chloro-purine), 6-halo-purine (e.g., 6-chloro-purine), 2-amino-6-methyl-purine, 8-azido-adenosine, 7-deaza-adenine, 7-deaza-8-aza-adenine, 7-deaza-2-amino-purine, 7-deaza-8-aza-2-amino-purine, 7-deaza-2,6-diaminopurine, 7-deaza-8-aza-2,6-diaminopurine, 1-methyl-adenosine (m¹A), 2-methyl-adenine (m²A), N6-methyl-adenosine (m⁶A), 2-methylthio-N6-methyl-adenosine (ms2m⁶A), N6-isopentenyl-adenosine (i⁶A), 2-methylthio-N6-isopentenyl-adenosine (ms²i⁶A), N6-(cis-hydroxyisopentenyl)adenosine (io⁶A), 2-methylthio-N6-(cis-hydroxyisopentenyl)adenosine (ms2io⁶A), N6-glycinylcarbamoyl-adenosine (g⁶A), N6-threonylcarbamoyl-adenosine (t⁶A), N6-methyl-N6-threonylcarbamoyl-adenosine (m⁶t⁶A), 2-methylthio-N6-threonylcarbamoyl-adenosine (ms²g⁶A), N6,N6-dimethyl-adenosine (m⁶₂A), N6-hydroxynorvalylcarbamoyl-adenosine (hn⁶A), 2-methylthio-N6-hydroxynorvalylcarbamoyl-adenosine (ms2hn⁶A), N6-acetyl-adenosine (ac⁶A), 7-methyl-adenine, 2-methylthio-adenine, 2-methoxy-adenine, α-thio-adenosine, 2′-O-methyl-adenosine (Am), N⁶,2′-O-dimethyl-adenosine (m⁶Am), N⁶-Methyl-2′-deoxyadenosine, N6,N6,2′-O-trimethyl-adenosine (m⁶₂Am), 1,2′-O-dimethyl-adenosine (m¹Am), 2′-O-ribosyladenosine (phosphate) (Ar(p)), 2-amino-N6-methyl-purine, 1-thio-adenosine, 8-azido-adenosine, 2′-F-ara-adenosine, 2′-F-adenosine, 2′-OH-ara-adenosine, and N6-(19-amino-pentaoxanonadecyl)-adenosine.

[1306] Guanine

[1307] In some embodiments, the modified nucleobase is a modified guanine. Exemplary nucleobases and nucleosides having a modified guanine include without limitation inosine (I), 1-methyl-inosine (m¹I), wyosine (imG), methylwyosine (mimG), 4-demethyl-wyosine (imG-14), isowyosine (imG2), wybutosine (yW), peroxywybutosine (o₂yW), hydroxywybutosine (OHyW), undermodified hydroxywybutosine (OHyW*), 7-deaza-guanosine, queuosine (Q), epoxyqueuosine (oQ), galactosyl-queuosine (galQ), mannosyl-queuosine (manQ), 7-cyano-7-deaza-guanosine (preQ₀), 7-aminomethyl-7-deaza-guanosine (preQ₁), archaeosine (G⁺), 7-deaza-8-aza-guanosine, 6-thio-guanosine, 6-thio-7-deaza-guanosine, 6-thio-7-deaza-8-aza-guanosine, 7-methyl-guanosine (m⁷G), 6-thio-7-methyl-guanosine, 7-methyl-inosine, 6-methoxy-guanosine, 1-methyl-guanosine (m′G), N2-methyl-guanosine (m²G), N2,N2-dimethyl-guanosine (m²₂G), N2,7-dimethyl-guanosine (m²,7G), N2, N2,7-dimethyl-guanosine (m²,2,7G), 8-oxo-guanosine, 7-methyl-8-oxo-guanosine, 1-meth thio-guanosine, N2-methyl-6-thio-guanosine, N2,N2-dimethyl-6-thio-guanosine, α-thio-guanosine, 2′-O-methyl-guanosine (Gm), N2-methyl-2′-O-methyl-guanosine (m²Gm), N2,N2-dimethyl-2′-O-methyl-guanosine (m²₂Gm), 1-methyl-2′-O-methyl-guanosine (m′Gm), N2,7-dimethyl-2′-O-methyl-guanosine (m²,7Gm), 2′-O-methyl-inosine (Im), 1,2′-O-dimethyl-inosine (m′Im), O⁶-phenyl-2′-deoxyinosine, 2′-O-ribosylguanosine (phosphate) (Gr(p)), 1-thio-guanosine, O⁶-methyl-guanosine, O⁶-Methyl-2′-deoxyguanosine, 2′-F-ara-guanosine, and 2′-F-guanosine.

Modified gRNAs

[1308] In some embodiments, the modified nucleic acids can be modified gRNAs. In some embodiments, gRNAs can be modified at the 3′ end. In this embodiment, the gRNAs can be modified at the 3′ terminal U ribose. For example, the two terminal hydroxyl groups of the U ribose can be oxidized to aldehyde groups and a concomitant opening of the ribose ring to afford a modified nucleoside as sown below:

[chemical structure]

wherein “U” can be an unmodified or modified uridine.

[1309] In another embodiment, the 3′ terminal U can be modified with a 2′3′ cyclic phosphate as shown below:

[chemical structure]

wherein “U” can be an unmodified or modified uridine.

[1310] In some embodiments, the gRNA molecules may contain 3′ nucleotides which can be stabilized against degradation, e.g., by incorporating one or more of the modified nucleotides described herein. In this embodiment, e.g., uridines can be replaced with modified uridines, e.g., 5-(2-amino)propyl uridine, and 5-bromo uridine, or with any of the modified uridines described herein; adenosines and guanosines can be replaced with modified adenosines and guanosines, e.g., with modifications at the 8-position, e.g., 8-bromo guanosine, or with any of the modified adenosines or guanosines described herein. In some embodiments, deaza nucleotides, e.g., 7-deaza-adenosine, can be incorporated into the gRNA. In some embodiments, O- and N-alkylated nucleotides, e.g., N6-methyl andenosine, can be incorporated into the gRNA. In some embodiments, sugar-modified ribonucleotides can be incorporated, e.g., wherein the 2′ OH— group is replaced by a group selected from H, —OR, —R (wherein R can be, e.g., alkyl, cycloalkyl, aryl, aralkyl, heteroaryl or sugar), halo, —SH, —SR (wherein R can be, e.g., alkyl, cycloalkyl, aryl, aralkyl, heteroaryl or sugar), amino (wherein amino can be, e.g., NH₂; alkylamino, dialkylamino, heterocyclyl, arylamino, diarylamino, heteroarylamino, diheteroarylamino, or amino acid); or cyano (—CN). In some embodiments, the phosphate backbone can be modified as described herein, e.g., with a phosphothioate group. In some embodiments, the nucleotides in the overhang region of the gRNA can each independently be a modified or unmodified nucleotide including, but not limited to 2′-sugar modified, such as, 2-F 2′-O-methyl, thymidine (T), 2′-O-methoxyethyl-5-methyluridine (Teo), 2′-O-methoxyethyladenosine (Aeo), 2′-O-methoxyethyl-5-methylcytidine (m5Ceo), and any combinations thereof.

[1311] In an embodiment, one or more or all of the nucleotides in single stranded RNA molecule, e.g., a gRNA molecule, are deoxynucleotides.

miRNA Binding Sites

[1312] microRNAs (or miRNAs) are naturally occurring cellular 19-25 nucleotide long noncoding RNAs. They bind to nucleic acid molecules having an appropriate miRNA binding site, e.g., in the 3′ UTR of a mRNA, and down-regulate gene expression. While not wishing to be bound by theory it is believed that the down regulation is either by reducing nucleic acid molecule stability or by inhibiting translation. An RNA species disclosed herein, e.g., an mRNA encoding Cas9 can comprise an miRNA binding site, e.g., in its 3′UTR. The miRNA binding site can be selected to promote down regulation of expression is a selected cell type. By way of example, the incorporation of a binding site for miR-122, a microRNA abundant in liver, can inhibit the expression of the gene of interest in the liver.

### EXAMPLES

[1313] The following Examples are merely illustrative are are not intended to limit the scope or content of the invention in any way.

### Example 1

### Evaluation of Candidate Guide RNAs

[1314] The suitability of candidate gRNAs can be evaluated as described in this example. Although described for a chimeric gRNA, the approach can also be used to evaluate modular gRNAs.

Cloning gRNAs into Vectors

[1315] For each gRNA, a pair of overlapping oligonucleotides is designed and obtained. Oligonucleotides are annealed and ligated into a digested vector backbone containing an upstream U6 promoter and the remaining sequence of a long chimeric gRNA. Plasmid is sequence-verified and prepped to generate sufficient amounts of transfection-quality DNA. Alternate promoters maybe used to drive in vivo transcription (e.g., H1 promoter) or for in vitro transcription (e.g., T7 promoter).

Initial gRNA Screen

[1316] Each gRNA to be tested is transfected, along with a plasmid expressing Cas9 and a small amount of a GFP-expressing plasmid into human cells. In preliminary experiments, these cells can be immortalized human cell lines such as 293T, K562 or U2OS. Alternatively, primary human cells may be used. In this case, cells may be relevant to the eventual therapeutic cell target (for example, photoreceptor cells). The use of primary cells similar to the potential therapeutic target cell population may provide important information on gene targeting rates in the context of endogenous chromatin and gene expression.

[1317] Transfection may be performed using lipid transfection (such as Lipofectamine or Fugene) or by electroporation. Following transfection, GFP expression can be determined either by fluorescence microscopy or by flow cytometry to confirm consistent and high levels of transfection. These preliminary transfections can comprise different gRNAs and different targeting approaches (17-mers, 20-mers, nuclease, dual-nickase, etc) to determine which gRNAs/combinations of gRNAs give the greatest activity.

[1318] Efficiency of cleavage with each gRNA may be assessed by measuring NHEJ-induced indel formation at the target locus by a T7E1-type assay or by sequencing. Alternatively, other mismatch-sensitive enzymes, such as Cell/Surveyor nuclease, may also be used.

[1319] For the T7E1 assay, PCR amplicons are approximately 500-700 bp with the intended cut site placed asymmetrically in the amplicon. Following amplification, purification and size-verification of PCR products, DNA is denatured and re-hybridized by heating to 95° C. and then slowly cooling. Hybridized PCR products are then digested with T7 Endonuclease I (or other mismatch-sensitive enzyme) which recognizes and cleaves non-perfectly matched DNA. If indels are present in the original template DNA, when the amplicons are denatured and re-annealed, this results in the hybridization of DNA strands harboring different indels and therefore lead to double-stranded DNA that is not perfectly matched. Digestion products may be visualized by gel electrophoresis or by capillary electrophoresis. The fraction of DNA that is cleaved (density of cleavage products divided by the density of cleaved and uncleaved) may be used to estimate a percent NHEJ using the following equation: % NHEJ=(1−(1−fraction cleaved)^{1/2}). The T7E1 assay is sensitive down to about 2-5% NHEJ.

[1320] Sequencing may be used instead of, or in addition to, the T7E1 assay. For Sanger sequencing, purified PCR amplicons are cloned into a plasmid backbone, transformed, miniprepped and sequenced with a single primer. For large sequencing numbers, Sanger sequencing may be used for determining the exact nature of indels after determining the NHEJ rate by T7E1.

[1321] Sequencing may also be performed using next generation sequencing techniques. When using next generation sequencing, amplicons may be 300-500 bp with the intended cut site placed asymmetrically. Following PCR, next generation sequencing adapters and barcodes (for example Illumina multiplex adapters and indexes) may be added to the ends of the amplicon, e.g., for use in high throughput sequencing (for example on an Illumina MiSeq). This method allows for detection of very low NHEJ rates.

### Example 2

### Assessment of Gene Targeting by HDR

[1322] The gRNAs that induce the greatest levels of NHEJ in initial tests can be selected for further evaluation of gene targeting efficiency. In this case, cells are derived from disease subjects and, therefore, harbor the relevant mutation.

[1323] Following transfection (usually 2-3 days post-transfection,) genomic DNA may be isolated from a bulk population of transfected cells and PCR may be used to amplify the target region. Following PCR, gene targeting efficiency can be determined by several methods.

[1324] Determination of gene targeting frequency involves measuring the percentage of alleles that have undergone homologous directed repair (HDR) with the exogenously provided donor template or endogenous genomic donor sequence and which therefore have incorporated the desired correction (e.g., the missing G nucleotide at position 2299). If the desired HDR event creates or destroys a restriction enzyme site, the frequency of gene targeting may be determined by a RFLP assay. If no restriction site is created or destroyed, sequencing may be used to determine gene targeting frequency. If a RFLP assay is used, sequencing may still be used to verify the desired HDR event and ensure that no other mutations are present. If an exogenously provided donor template is employed, at least one of the primers is placed in the endogenous gene sequence outside of the region included in the homology arms, which prevents amplification of donor template still present in the cells. Therefore, the length of the homology arms present in the donor template may affect the length of the PCR amplicon. PCR amplicons can either span the entire donor region (both primers placed outside the homology arms) or they can span only part of the donor region and a single junction between donor and endogenous DNA (one internal and one external primer). If the amplicons span less than the entire donor region, two different PCRs should be used to amplify and sequence both the 5′ and the 3′ junction.

[1325] If the PCR amplicon is short (less than 600 bp) it is possible to use next generation sequencing. Following PCR, next generation sequencing adapters and barcodes (for example Illumina multiplex adapters and indexes) may be added to the ends of the amplicon, e.g., for use in high throughput sequencing (for example on an Illumina MiSeq). This method allows for detection of very low gene targeting rates.

[1326] If the PCR amplicon is too long for next generation sequencing, Sanger sequencing can be performed. For Sanger sequencing, purified PCR amplicons will be cloned into a plasmid backbone (for example, TOPO cloned using the LifeTech Zero Blunt® TOPO® cloning kit), transformed, miniprepped and sequenced.

[1327] The same or similar assays described above can be used to measure the percentage of alleles that have undergone HDR with endogenous genomic donor sequence and which therefore have incorporated the desired correction.

### Incorporation by Reference

[1328] All publications, patents, and patent applications mentioned herein are hereby incorporated by reference in their entirety as if each individual publication, patent or patent application was specifically and individually indicated to be incorporated by reference. In case of conflict, the present application, including any definitions herein, will control.

### Equivalents

[1329] Those skilled in the art will recognize, or be able to ascertain using no more than routine experimentation, many equivalents to the specific embodiments of the invention described herein. Such equivalents are intended to be encompassed by the following claims.

[1330] Other embodiments are within the following claims.

What is claimed is:

1. A gRNA molecule comprising a targeting domain which is complementary with a target domain from the USH2A gene.

2. The gRNA molecule of claim 1, wherein said targeting domain is configured to provide a cleavage event selected from a double strand break and a single strand break, within 200 nucleotides of a target position of a guanine deletion at nucleotide positon 2299 (2299delG) in the USH2A gene.

3. The gRNA molecule of claim 1 or 2, wherein said targeting domain comprises a sequence that is the same as, or differs by no more than 3 nucleotides from, a targeting domain sequence from Table 1.

4. The gRNA molecule of any of claims 1-3, wherein said targeting domain is selected from those in Table 1.

5. The gRNA molecule of any of claims 1-4, wherein said targeting domain is GAGUGCAAAAAAGAAGCCAA.

6. The gRNA molecule of any of claims 1-4, wherein said targeting domain is GUUAGAUGUCACCAAUUGUA.

7. The gRNA molecule of any of claims 1-4, wherein said targeting domain is GGUGUCACACUGAAGUCCUU.

8. The gRNA molecule of any of claims 1-4, wherein said targeting domain is GCCAUGGAGGUUACACUGGC.

9. The gRNA molecule of any of claims 1-4, wherein said targeting domain is GUCACAGGCCUUACAAU.

10. The gRNA molecule of any of claims 1-4, wherein said targeting domain is GUCACACUGAAGUCCUU.

11. The gRNA molecule of any of claims 1-4, wherein said targeting domain is UGCAAAAAAGAAGCCAA.

12. The gRNA molecule of any of claims 1-4, wherein said targeting domain is UGCAGAGAAAACUUUUA.

13. The gRNA molecule of any of claims 1-4, wherein said targeting domain is UGUUCACUGAGCCAUGG.

14. The gRNA molecule of any of claims 1-4, wherein said targeting domain is AUGGAGGUUACACUGGC.

15. The gRNA molecule of claim 1 or 2, wherein said targeting domain comprises a sequence that is the same as, or differs by no more than 3 nucleotides from, a targeting domain sequence from Table 2.

16. The gRNA molecule of any of claim 1, 2 or 15, wherein said targeting domain is selected from Table 2.

17. The gRNA molecule of any of claim 1 or 2, wherein said targeting domain comprises a sequence that is the same as, or differs by no more than 3 nucleotides from, a targeting domain sequence from Table 3.

18. The gRNA molecule of claim 1, wherein said targeting domain is selected from Table 3.

19. The gRNA molecule of claim 1 or 2, wherein said targeting domain comprises a sequence that is the same as, or differs by no more than 3 nucleotides from, a targeting domain sequence from Tables 4A-4E.

20. The gRNA molecule of any of claim 1, 2 or 19, wherein said targeting domain is selected from Tables 4A-4E.

21. The gRNA molecule of claim 1 or 2, wherein said targeting domain comprises a sequence that is the same as, or differs by no more than 3 nucleotides from, a targeting domain sequence from Tables 5A-5F.

22. The gRNA molecule of any of claim 1, 2 or 21, wherein said targeting domain is selected from Tables 5A-5F.

23. The gRNA molecule of claim 1 or 2, wherein said targeting domain comprises a sequence that is the same as, or differs by no more than 3 nucleotides from, a targeting domain sequence from Tables 6A-6D.

24. The gRNA molecule of any of claim 1, 2 or 23, wherein said targeting domain is selected from Tables 6A-6D.

25. The gRNA molecule of any of claims 1-24, wherein said gRNA is a modular gRNA.

26. The gRNA molecule of any of claims 1-24, wherein said gRNA is a chimeric gRNA.

27. The gRNA molecule of any of claims 1-26, wherein said targeting domain is 16 nucleotides or more in length.

28. The gRNA molecule of any of claims 1-27, wherein said targeting domain is 16 nucleotides in length.

29. The gRNA molecule of any of claims 1-27, wherein said targeting domain is 17 nucleotides in length.

30. The gRNA molecule of any of claims 1-27, wherein said targeting domain is 18 nucleotides in length.

31. The gRNA molecule of any of claims 1-27, wherein said targeting domain is 19 nucleotides in length.

32. The gRNA molecule of any of claims 1-27, wherein said targeting domain is 20 nucleotides in length.

33. The gRNA molecule of any of claims 1-27, wherein said targeting domain is 21 nucleotides in length.

34. The gRNA molecule of any of claims 1-27, wherein said targeting domain is 22 nucleotides in length.

35. The gRNA molecule of any of claims 1-27, wherein said targeting domain is 23 nucleotides in length.

36. The gRNA molecule of any of claims 1-27, wherein said targeting domain is 24 nucleotides in length.

37. The gRNA molecule of any of claims 1-27, wherein said targeting domain is 25 nucleotides in length.

38. The gRNA molecule of any of claims 1-27, wherein said targeting domain is 26 nucleotides in length.

39. The gRNA molecule of any of claims 1-38, comprising from 5′ to 3′:
a targeting domain;
a first complementarity domain;
a linking domain;
a second complementarity domain;
a proximal domain; and
a tail domain.

40. The gRNA molecule of any of claims 1-39, comprising:
a linking domain of no more than 25 nucleotides in length;
a proximal and tail domain, that taken together, are at least 20 nucleotides in length;
a targeting domain of 17 or 18 nucleotides in length.

41. The gRNA molecule of any of claims 1-40, comprising:
a linking domain of no more than 25 nucleotides in length;
a proximal and tail domain, that taken together, are at least 30 nucleotides in length;
a targeting domain of 17 or 18 nucleotides in length.

42. The gRNA molecule of any of claims 1-41, comprising:
a linking domain of no more than 25 nucleotides in length;
a proximal and tail domain, that taken together, are at least 30 nucleotides in length;
a targeting domain of 17 nucleotides in length.

43. The gRNA molecule of any of claims 1-42, comprising:
a linking domain of no more than 25 nucleotides in length;
a proximal and tail domain, that taken together, are at least 40 nucleotides in length;
a targeting domain of 17 nucleotides in length.

44. A nucleic acid comprising a sequence encoding (a) a gRNA molecule comprising a targeting domain that is complementary with a target domain in a USH2A gene.

45. The nucleic acid of claim 44, wherein said gRNA molecule is a gRNA molecule of any of claims 1-43.

46. The nucleic acid of claim 44 or 45, wherein said targeting domain is configured to provide a cleavage event selected from a double strand break and a single strand break, within 200 nucleotides of a target position of a guanine deletion at nucleotide positon 2299 (2299delG) in a USH2A gene.

47. The nucleic acid of any of claims 44-46, wherein said targeting domain comprises a sequence that is the same as, or differs by no more than 3 nucleotides from, a targeting domain sequence from Table 1.

48. The nucleic acid of any of claims 44-47, wherein said targeting domain is selected from those in Table 1.

49. The nucleic acid of any of claims 44-48, wherein said targeting domain is: GAGUGCAAAAAAGAAGCCAA.

50. The nucleic acid of any of claims 44-49, wherein said targeting domain is: GUUAGAUGUCACCAAUUGUA.

51. The nucleic acid of any of claims 44-49, wherein said targeting domain is: GGUGUCACACUGAAGUCCUU.

52. The nucleic acid of any of claims 44-49, wherein said targeting domain is: GCCAUGGAGGUUACACUGGC.

53. The nucleic acid of any of claims 44-49, wherein said targeting domain is: GUCACAGGCCUUACAAU.

54. The nucleic acid of any of claims 44-49, wherein said targeting domain is: GUCACACUGAAGUCCUU.

55. The nucleic acid of any of claims 44-49, wherein said targeting domain is: UGCAAAAAAGAAGCCAA.

56. The nucleic acid of any of claims 44-49, wherein said targeting domain is: UGCAGAGAAAACUUUUA.

57. The nucleic acid of any of claims 44-49, wherein said targeting domain is: UGUUCACUGAGCCAUGG.

58. The nucleic acid of any of claims 44-49, wherein said targeting domain is: AUGGAGGUUACACUGGC.

59. The nucleic acid of any of claims 44-46, wherein said targeting domain comprises a sequence that is the same as, or differs by no more than 3 nucleotides from, a targeting domain sequence from Table 2.

60. The nucleic acid of any of claim 44-46 or 59, wherein said targeting domain is selected from Table 2.

61. The nucleic acid of any of claims 44-46, wherein said targeting domain comprises a sequence that is the same as, or differs by no more than nucleotides from, a targeting domain sequence from Table 3.

62. The nucleic acid of any of claim 44-46 or 61, wherein said targeting domain is selected from Table 3.

63. The nucleic acid of any of claims 44-46, wherein said targeting domain comprises a sequence that is the same as, or differs by no more than 3 nucleotides from, a targeting domain sequence from Tables 4A-4E.

64. The nucleic acid of any of claim 44-46 or 63, wherein said targeting domain is selected from Tables 4A-4E.

65. The nucleic acid of any of claims 44-46, wherein said targeting domain comprises a sequence that is the same as, or differs by no more than 3 nucleotides from, a targeting domain sequence from Tables 5A-5F.

66. The nucleic acid of any of claim 44-46 or 65, wherein said targeting domain is selected from Tables 5A-5F.

67. The nucleic acid of any of claims 44-46, wherein said targeting domain comprises a sequence that is the same as, or differs by no more than 3 nucleotides from, a targeting domain sequence from Tables 6A-6D.

68. The nucleic acid of any of claim 44-46 or 67, wherein said targeting domain is selected from Tables 6A-6D.

69. The nucleic acid of any of claims 44-68, wherein said gRNA is a modular gRNA.

70. The nucleic acid of any of claims 44-68, wherein said gRNA is a chimeric gRNA.

71. The nucleic acid of any of claims 44-70, wherein said targeting domain is 16 nucleotides or more in length.

72. The nucleic acid of any of claims 44-71, wherein said targeting domain is 16 nucleotides in length.

73. The nucleic acid of any of claims 44-71, wherein said targeting domain is 17 nucleotides in length.

74. The nucleic acid of any of claims 44-71, wherein said targeting domain is 18 nucleotides in length.

75. The nucleic acid of any of claims 44-71, wherein said targeting domain is 19 nucleotides in length.

76. The nucleic acid of any of claims 44-71, wherein said targeting domain is 20 nucleotides in length.

77. The nucleic acid of any of claims 44-71, wherein said targeting domain is 21 nucleotides in length.

78. The nucleic acid of any of claims 44-71, wherein said targeting domain is 22 nucleotides in length.

79. The nucleic acid of any of claims 44-71, wherein said targeting domain is 23 nucleotides in length.

80. The nucleic acid of any of claims 44-71, wherein said targeting domain is 24 nucleotides in length.

81. The nucleic acid of any of claims 44-71, wherein said targeting domain is 25 nucleotides in length.

82. The nucleic acid of any of claims 44-71, wherein said targeting domain is 26 nucleotides in length.

83. The nucleic acid of any of claims 44-82, comprising from 5′ to 3′:
a targeting domain;
a first complementarity domain;
a linking domain;
a second complementarity domain;
a proximal domain; and
a tail domain.

84. The nucleic acid of any of claims 44-83, comprising:
a linking domain of no more than 25 nucleotides in length;
a proximal and tail domain, that taken together, are at least 20 nucleotides in length;
a targeting domain of 17 or 18 nucleotides in length.

85. The nucleic acid of any of claims 44-84, comprising:
a linking domain of no more than 25 nucleotides in length;
a proximal and tail domain, that taken together, are at least 30 nucleotides in length;
a targeting domain of 17 or 18 nucleotides in length.

86. The nucleic acid of any of claims 44-85, comprising:
a linking domain of no more than 25 nucleotides in length;
a proximal and tail domain, that taken together, are at least 30 nucleotides in length;
a targeting domain of 17 nucleotides in length.

87. The nucleic acid of any of claims 44-86, comprising:
a linking domain of no more than 25 nucleotides in length;
a proximal and tail domain, that taken together, are at least 40 nucleotides in length;
a targeting domain of 17 nucleotides in length.

88. The nucleic acid of any of claims 44-87, further comprising: (b) a sequence that encodes a Cas9 molecule.

89. The nucleic acid of claim 88, wherein said Cas9 molecule comprises a nickase molecule.

90. The nucleic acid of claim 88 or 89, wherein said Cas9 molecule is an eaCas9.

91. The nucleic acid of claim 90, wherein said eaCas9 forms a double strand break in a target nucleic acid.

92. The nucleic acid of claim 90, wherein said eaCas9 molecule forms a single strand break in a target nucleic acid.

93. The nucleic acid of claim 92, wherein said single strand break is formed in the strand of the target nucleic acid to which the targeting domain of said gRNA is complementary.

94. The nucleic acid of claim 92, wherein said single strand break is formed in the strand of the target nucleic acid other than the strand to which to which the targeting domain of said gRNA is complementary.

95. The nucleic acid of any of claim 90, 92 or 93, wherein said eaCas9 molecule comprises HNH-like domain cleavage activity but has no, or no significant, N-terminal RuvC-like domain cleavage activity.

96. The nucleic acid of any of claim 90, 92, 93 or 95, wherein said eaCas9 molecule is an HNH-like domain nickase.

97. The nucleic acid of any of claim 90, 92, 93, 95 or 96, wherein said eaCas9 molecule comprises a mutation at D10.

98. The nucleic acid of any of claim 90, 92 or 94, wherein said eaCas9 molecule comprises N-terminal RuvC-like domain cleavage activity but has no, or no significant, HNH-like domain cleavage activity.

99. The nucleic acid of any of claim 90, 92, 94 or 98, wherein said eaCas9 molecule is an N-terminal RuvC-like domain nickase.

100. The nucleic acid of claim 90, 92, 94, 98 or 99, wherein said eaCas9 molecule comprises a mutation at H840.

101. The nucleic acid of any of claims 44-100, further comprising: (c) a sequence that encodes a second gRNA molecule described herein having a targeting domain that is complementary to a second target domain of the USH2A gene.

102. The nucleic acid of claim 101, wherein said second gRNA is a gRNA molecule of any of claims 1-43.

103. The nucleic acid of claim 102, wherein said targeting domain of said second gRNA is configured to provide a cleavage event selected from a double strand break and a single strand break, within 200 nucleotides of a guanine deletion at nucleotide positon 2299 (2299delG) in the USH2A gene.

104. The nucleic acid of any of claims 101-103, wherein said targeting domain of said second gRNA comprises a sequence that is the same as, or differs by no more than 3 nucleotides from, a targeting domain sequence from Table 1.

105. The nucleic acid of any of claims 101-104, wherein said targeting domain of said second gRNA is selected from those in Table 1.

106. The nucleic acid of any of claims 101-105, wherein said targeting domain of said second gRNA is GAGUGCAAAAAAGAAGCCAA.

107. The nucleic acid of any of claims 101-105, wherein said targeting domain of said second gRNA is GUUAGAUGUCACCAAUUGUA.

108. The nucleic acid of any of claims 101-105, wherein said targeting domain of said second gRNA is GGUGUCACACUGAAGUCCUU.

109. The nucleic acid of any of claims 101-105, wherein said targeting domain of said second gRNA is GCCAUGGAGGUUACACUGGC.

110. The nucleic acid of any of claims 101-105, wherein said targeting domain of said second gRNA is GUCACAGGCCUUACAAU.

111. The nucleic acid of any of claims 101-105, wherein said targeting domain of said second gRNA is GUCACACUGAAGUCCUU.

112. The nucleic acid of any of claims 101-105, wherein said targeting domain of said second gRNA is UGCAAAAAAGAAGCCAA.

113. The nucleic acid of any of claims 101-105, wherein said targeting domain of said second gRNA is UGCAGAGAAAACUUUUA.

114. The nucleic acid of any of claims 101-105, wherein said targeting domain of said second gRNA is UGUUCACUGAGCCAUGG.

115. The nucleic acid of any of claims 101-105, wherein said targeting domain of said second gRNA is AUGGAGGUUACACUGGC.

116. The nucleic acid of any of claims 101-103, wherein said targeting domain of said second gRNA comprises a sequence that is the same as, or differs by no more than 3 nucleotides from, a targeting domain sequence from Table 2.

117. The nucleic acid of any of claim 101-103 or 116, wherein said targeting domain of said second gRNA is selected from Table 2.

118. The nucleic acid of any of claims 101-103, wherein said targeting domain of said second gRNA comprises a sequence that is the same as, or differs by no more than 3 nucleotides from, a targeting domain sequence from Table 3.

119. The nucleic acid of any of claim 101-103 or 118, wherein said targeting domain of said second gRNA is selected from Table 3.

120. The nucleic acid of any of claims 101-103, wherein said targeting domain of said gRNA comprises a sequence that is the same as, or differs by no more than 3 nucleotides from, a targeting domain sequence from Tables 4A-4E.

121. The nucleic acid of any of claim 101-103 or 120, wherein said targeting domain of said gRNA is selected from Tables 4A-4E.

122. The nucleic acid of any of claims 101-103, wherein said targeting domain of said gRNA comprises a sequence that is the same as, or differs by no more than 3 nucleotides from, a targeting domain sequence from Tables 5A-5F.

123. The nucleic acid of any of claim 101-103 or 122, wherein said targeting domain of said gRNA is selected from Tables 5A-5F.

124. The nucleic acid of any of claims 101-103, wherein said targeting domain of said gRNA comprises a sequence that is the same as, or differs by no more than 3 nucleotides from, a targeting domain sequence from Tables 6A-6D.

125. The nucleic acid of any of claim 101-103 or 124, wherein said targeting domain of said gRNA is selected from Tables 6A-6D.

126. The nucleic acid of any of claims 101-125, wherein said second gRNA is a modular gRNA.

127. The nucleic acid of any of claims 101-125, wherein said second gRNA is a chimeric gRNA.

128. The nucleic acid of any of claims 101-127, wherein said targeting domain is 16 nucleotides or more in length.

129. The nucleic acid of any of claims 101-128, wherein said targeting domain is 16 nucleotides in length.

130. The nucleic acid of any of claims 101-128, wherein said targeting domain is 17 nucleotides in length.

131. The nucleic acid of any of claims 101-128, wherein said targeting domain is 18 nucleotides in length.

132. The nucleic acid of any of claims 101-128, wherein said targeting domain is 19 nucleotides in length.

133. The nucleic acid of any of claims 101-128, wherein said targeting domain is 20 nucleotides in length.

134. The nucleic acid of any of claims 101-128, wherein said targeting domain is 21 nucleotides in length.

135. The nucleic acid of any of claims 101-128, wherein said targeting domain is 22 nucleotides in length.

136. The nucleic acid of any of claims 101-128, wherein said targeting domain is 23 nucleotides in length.

137. The nucleic acid of any of claims 101-128, wherein said targeting domain is 24 nucleotides in length.

138. The nucleic acid of any of claims 101-128, wherein said targeting domain is 25 nucleotides in length.

139. The nucleic acid of any of claims 101-128, wherein said targeting domain is 26 nucleotides in length.

140. The nucleic acid of any of claims 101-139, wherein said second gRNA comprises from 5′ to 3′:
a targeting domain;
a first complementarity domain;
a linking domain;
a second complementarity domain;
a proximal domain; and
a tail domain.

141. The nucleic acid of any of claims 101-140, wherein said second gRNA comprises:
a linking domain of no more than 25 nucleotides in length;
a proximal and tail domain, that taken together, are at least 20 nucleotides in length;
a targeting domain of 17 or 18 nucleotides in length.

142. The nucleic acid of any of claims 101-141, wherein said second gRNA comprises:
a linking domain of no more than 25 nucleotides in length;
a proximal and tail domain, that taken together, are at least 30 nucleotides in length;
a targeting domain of 17 or 18 nucleotides in length.

143. The nucleic acid of any of claims 101-142, wherein said second gRNA comprises:
a linking domain of no more than 25 nucleotides in length;
a proximal and tail domain, that taken together, are at least 30 nucleotides in length;
a targeting domain of 17 nucleotides in length.

144. The nucleic acid of any of claims 101-143, wherein said second gRNA comprises:
a linking domain of no more than 25 nucleotides in length;
a proximal and tail domain, that taken together, are at least 40 nucleotides in length;
a targeting domain of 17 nucleotides in length.

145. The nucleic acid of any of claims 101-144, wherein the targeting domain of said gRNA molecule and the targeting domain of said second gRNA molecules are complementary to opposite strands of the target nucleic acid molecule.

146. The nucleic acid of any of claims 101-145, wherein said gRNA molecule and said second gRNA molecule are configured such that the PAMs are oriented outward.

147. The nucleic acid of any of claims 101-146, wherein said gRNA molecule and said second gRNA molecule are configured such that they do not overlap and are separated by as much as 50, 100, or 200 nucleotides.

148. The nucleic acid of any of claims 101-147, wherein said gRNA and second gRNA are configured such that single strand breaks are formed on each strand of the target nucleic acid.

149. The nucleic acid of any of claims 101-148, wherein said gRNA and second gRNA are configured such that single strand breaks are formed on each strand of the target nucleic acid and the single strand beaks are within 50-100 nucleotides of one another.

150. The nucleic acid of any of claims 101-149, wherein said gRNA molecule and said second gRNA molecule are configured such that the first and second breaks are 5′ to the guanine deletion at nucleotide position 2299 in the USH2A gene.

151. The nucleic acid of any of claims 101-149, wherein said gRNA molecule and said second gRNA molecule are configured such that the first and second breaks are 3′ to to the guanine deletion at nucleotide position 2299 in the USH2A gene.

152. The nucleic acid of any of claims 101-149, wherein said gRNA molecule and said second gRNA molecule are configured such that the first and second breaks flank the guanine deletion at nucleotide position 2299 in the USH2A gene.

153. The nucleic acid of any of any of claims 44-152, further comprising: (d) a template nucleic acid.

154. The nucleic acid of claim 153, wherein the template nucleic acid is a single stranded nucleic acid.

155. The nucleic acid of claim 153, wherein said template nucleic acid is a double stranded nucleic acid.

156. The nucleic acid of any of claims 153-155, wherein said template nucleic acid comprises a nucleotide sequence insertion or change in the target nucleic acid.

157. The nucleic acid of any of claims 153-156, wherein said template nucleic acid comprises a nucleotide sequence that is used to modify the target position.

158. The nucleic acid of any of claims 153-157, wherein said template nucleic acid comprises a nucleotide sequence that corresponds to wildtype sequence of the the target position.

159. The nucleic acid of any of claims 153-158114, wherein said template nucleic acid comprises a guanine to replace the deleted guanine at position 2299 in the USH2A gene.

160. The nucleic acid of any of claims 153-159, wherein said template nucleic acid comprises a 5′ homology arm.

161. The nucleic acid of any of claims 153-160, wherein said template nucleic acid comprises a 5′ homology arm from Table 13.

162. The nucleic acid of any of claims 153-161, wherein the template nucleic acid comprises a 3′ homology arm.

163. The nucleic acid of any of claim 153-162, wherein the template nucleic acid comprises a 3′ homology arm from Table 13.

164. The nucleic acid of any of claims 88-163, wherein each of (a) and (b) is present on the same nucleic acid molecule.

165. The nucleic acid of claim 164, wherein said nucleic acid molecule is an AAV vector.

166. The nucleic acid of any of claims 88-163, wherein: (a) is present on a first nucleic acid molecule; and (b) is present on a second nucleic acid molecule.

167. The nucleic acid of claim 166, wherein said first and second nucleic acid molecules are AAV vectors.

168. The nucleic acid of any of claims 164-167, wherein said nucleic acid does not comprise (c) a sequence that encodes a second gRNA molecule.

169. The nucleic acid of any of claims 101-163, wherein each of (a) and (c) is present on the same nucleic acid molecule.

170. The nucleic acid of claim 169, wherein said nucleic acid molecule is an AAV vector.

171. The nucleic acid of any of claims 101-163, wherein (a) is present on a first nucleic acid molecule; and (c) is present on a second nucleic acid molecule.

172. The nucleic acid of claim 171, wherein said first and second nucleic acid molecules are AAV vectors.

173. The nucleic acid of any of claims 169-172, wherein said nucleic acid does not comprise (d) a template nucleic acid.

174. The nucleic acid of any of claims 101-163, wherein each of (a), (b), and (c) are present on the same nucleic acid molecule.

175. The nucleic acid of claim 174, wherein said nucleic acid molecule is an AAV vector.

176. The nucleic acid of any of claims 101-163, wherein: one of (a), (b), and (c) is encoded on a first nucleic acid molecule; and a second and third of (a), (b), and (c) is encoded on a second nucleic acid molecule.

177. The nucleic acid of claim 176, wherein said first and second nucleic acid molecules are AAV vectors.

178. The nucleic acid of any of claims 101-163, wherein: (a) is present on a first nucleic acid molecule; and (b) and (c) are present on a second nucleic acid molecule.

179. The nucleic acid of claim 178, wherein said first and second nucleic acid molecules are AAV vectors.

180. The nucleic acid of any of claims 101-163, wherein: (b) is present on a first nucleic acid molecule; and (a) and (c) are present on a second nucleic acid molecule.

181. The nucleic acid of claim 180, wherein said first and second nucleic acid molecules are AAV vectors.

182. The nucleic acid of any of claims 101-163, wherein: (c) is present on a first nucleic acid molecule; and (a) and (b) are present on a second nucleic acid molecule.

183. The nucleic acid of claim 182, wherein said first and second nucleic acid molecules are AAV vectors.

184. The nucleic acid of any of claims 153-163, wherein each of (a), (b), (c) and (d) are present on the same nucleic acid molecule.

185. The nucleic acid of claim 184, wherein said nucleic acid molecule is an AAV vector.

186. The nucleic acid of any of claims 153-163, wherein: one of (a), (b), (c) and (d) is encoded on a first nucleic acid molecule; and a second, third, and fourth of (a), (b), (c) and (d) is encoded on a second nucleic acid molecule.

187. The nucleic acid of claim 186, wherein said first and second nucleic acid molecules are AAV vectors.

188. The nucleic acid of any of claims 153-163, wherein: (a) is present on a first nucleic acid molecule; and (b), (c), and (d) are present on a second nucleic acid molecule.

189. The nucleic acid of claim 188, wherein said first and second nucleic acid molecules are AAV vectors.

190. The nucleic acid of any of claims 153-163, wherein: (b) is present on a first nucleic acid molecule; and (a), (c), and (d) are present on a second nucleic acid molecule.

191. The nucleic acid of claim 190, wherein said first and second nucleic acid molecules are AAV vectors.

192. The nucleic acid of any of claims 153-163, wherein: (c) is present on a first nucleic acid molecule; and (a), (b), and (d) are present on a second nucleic acid molecule.

193. The nucleic acid of claim 192, wherein said first and second nucleic acid molecules are AAV vectors.

194. The nucleic acid of any of claims 153-163, wherein: (d) is present on a first nucleic acid molecule; and (a), (b), and (c) are present on a second nucleic acid molecule.

195. The nucleic acid of claim 194, wherein said first and second nucleic acid molecules are AAV vectors.

196. The nucleic acid of any of claims 153-163, wherein: a first and second of (a), (b), (c) and (d) is encoded on a first nucleic acid molecule; and a third and fourth of (a), (b), (c) and (d) is encoded on a second nucleic acid molecule.

197. The nucleic acid of claim 196, wherein said first and second nucleic acid molecules are AAV vectors.

198. The nucleic acid of any of claims 153-163, wherein: (a) and (b) are present on a first nucleic acid molecule; and (c) and (d) are present on a second nucleic acid molecule.

199. The nucleic acid of claim 198, wherein said first and second nucleic acid molecules are AAV vectors.

200. The nucleic acid of any of claims 153-163, wherein (a) and (c) are present on a first nucleic acid molecule; and (b) and (d) are present on a second nucleic acid molecule.

201. The nucleic acid of claim 200, wherein said first and second nucleic acid molecules are AAV vectors.

202. The nucleic acid of any of claims 153-163, wherein (a) and (d) are present on a first nucleic acid molecule; and (b) and (c) are present on a second nucleic acid molecule.

203. The nucleic acid of claim 202, wherein said first and second nucleic acid molecules are AAV vectors.

204. The nucleic acid of any of claims 153-163, wherein: (b) and (d) are present on a first nucleic acid molecule; and (a) and (c) are present on a second nucleic acid molecule.

205. The nucleic acid of claim 204, wherein said first and second nucleic acid molecules are AAV vectors.

206. The nucleic acid of any of claim 166, 168, 171, 173, 176, 178, 180, 182, 186, 188, 190, 192, 194, 196, 198, 200, 202 or 204, wherein said first nucleic acid molecule is other than an AAV vector and said second nucleic acid molecule is an AAV vector.

207. The nucleic acid of any of claims 44-206, wherein said nucleic acid comprises a promoter operably linked to the sequence that encodes said gRNA molecule of (a).

208. The nucleic acid of any of claim 101-167 or 169-207, wherein said nucleic acid comprises a second promoter operably linked to the sequence that encodes the second gRNA molecule of (c).

209. The nucleic acid of claim 208, wherein the promoter and second promoter differ from one another.

210. The nucleic acid of claim 208, wherein the promoter and second promoter are the same.

211. The nucleic acid of any of claims 88-210, wherein said nucleic acid comprises a promoter operably linked to the sequence that encodes the Cas9 molecule of (b).

212. A composition comprising the (a) gRNA molecule of any of claims 1-43.

213. The composition of claim 212, further comprising (b) a Cas9 molecule of any of claims 88-100.

214. The composition of any of claim 211 or 213, further comprising (c) a second gRNA molecule of any of claim 1-43 or 101-152.

215. The composition of any of claims 212-214, further comprising: (d) a template nucleic acid of any of claims 153-163.

216. A method of altering a cell comprising contacting said cell with: (a) a gRNA of any of claims 1-43; (b) a Cas9 molecule of any of claims 88-100; optionally, (c) a second gRNA of any of claim 1-43 or 101-152; and (d) a template nucleic acid of any of claims 153-163.

217. The method of claim 216, comprising contacting said cell with (a), (b), (c), and (d).

218. The method of claim 216 or 217, wherein said cell is from a subject suffering from or likely to develop Usher Syndrome or retinitis pigmentosa-39.

219. The method of any of claims 216-218, wherein said cell is from a subject having a mutation in the USH2A gene, e.g., a deletion of guanine at nucleotide positon 2299 (2299delG).

220. The method of any of claims 216-219, wherein said cell is a photoreceptor cell.

221. The method of any of claims 216-220, wherein said contacting is performed ex vivo.

222. The method of claim 221, wherein said contacted cell is returned to said subject's body.

223. The method of any of claims 216-220, wherein said contacting is performed in vivo.

224. The method of any of claims 216-223, comprising acquiring knowledge of the presence of a guanine deletion at nucleotide position 2299 in the USH2A gene in said cell.

225. The method of claim 224, comprising acquiring knowledge of the presence of a guanine deletion at nucleotide position 2299 in the USH2A gene in said cell by sequencing a portion of the USH2A gene.

226. The method of any of claims 216-225, comprising, based on the presence of a guanine deletion at nucleotide position 2299 in the USH2A gene, selecting a template nucleic acid.

227. The method of any of claims 216-226, comprising correcting the guanine deletion at nucleotide position 2299 in the USH2A gene.

228. The method of any of claims 216-227, wherein contacting comprises contacting said cell with a nucleic acid that expresses at least one of (a), (b), and (c).

229. The method of any of claims 216-228, wherein contacting comprises contacting the cell with a nucleic acid of any of claims 44-211.

230. The method of any of claims 216-229, wherein contacting comprises delivering to said cell said Cas9 molecule of (b) and a nucleic acid which encodes and (a) and optionally (c).

231. The method of any of claims 216-229, wherein contacting comprises delivering to said cell said Cas9 molecule of (b), said gRNA of (a) and optionally said second gRNA of (c).

232. The method of any of claims 216-229, wherein contacting comprises delivering to said cell said gRNA of (a), optionally said second gRNA of (c) and a nucleic acid that encodes the Cas9 molecule of (b).

233. A method of treating a subject having or likely to develop Usher Syndrome or retinitis pigmentosa 39, comprising contacting said subject (or a cell from said subject) with: (a) a gRNA of any of claims 1-43; (b) a Cas9 molecule of any of claims 88-100; optionally, (c) a second gRNA of any of claim 1-43 or 101-152; and (d) a template nucleic acid of any of claims 153-163.

234. The method of claim 233, further comprising contacting said subject with (a), (b), (c), and (d).

235. The method of claim 233 or 234, wherein said subject has a guanine deletion at nucleotide position 2299 in the USH2A gene.

236. The method of any of claims 233-235, comprising acquiring knowledge of the presence of a guanine deletion at nucleotide position 2299 in the USH2A gene in said subject.

237. The method of claim 236, comprising acquiring knowledge of the presence of a guanine deletion at nucleotide position 2299 in the USH2A gene in said subject by sequencing a portion of the USH2A gene.

238. The method of any of claims 233-237, comprising, based on the presence of a guanine deletion at nucleotide position 2299 in the USH2A gene in said subject, selecting a template nucleic acid.

239. The method of any of claims 233-238, comprising correcting the guanine deletion at nucleotide positon 2299 in the USH2A gene.

240. The method of any of claims 233-239, wherein a cell of said subject is contacted ex vivo with (a), (b), (d) and optionally (c).

241. The method of claim 240, wherein said cell is returned to the subject's body.

242. The method of any of claims 233-241, wherein treatment comprises introducing a cell into said subject's body, wherein said cell subject was contacted ex vivo with (a), (b), (d) and optionally (c).

243. The method of any of claims 233-239, wherein said contacting is performed in vivo.

244. The method of claim 243, wherein said contacting comprises subretinal delivery.

245. The method of claim 244, wherein said contacting comprises subretinal injection.

246. The method of any of claims 233-245, wherein contacting comprises contacting said subject with a nucleic acid that expresses at least one of (a), (b), and (c).

247. The method of any of claims 233-246, wherein contacting comprises contacting said subject with a nucleic acid of any of claims 44-211.

248. The method of any of claims 233-247, wherein contacting comprises delivering to said subject said Cas9 molecule of (b) and a nucleic acid which encodes and (a) and optionally (c).

249. The method of any of claims 233-247, wherein contacting comprises delivering to said subject said Cas9 molecule of (b), said gRNA of (a) and optionally said second gRNA of (c).

250. The method of any of claims 233-247, wherein contacting comprises delivering to said subject said gRNA of (a), optionally said second gRNA of (c) and a nucleic acid that encodes the Cas9 molecule of (b).

251. A gRNA molecule of any of claims 1-43 for use in treating Usher Syndrome or retinitis pigmentosa 39 in a subject.

252. The gRNA molecule of claim 252, wherein the gRNA molecule in used in combination with (b) a Cas9 molecule of any of claims 88-100.

253. The gRNA molecule of claim 251 or 252, wherein the gRNA molecule is used in combination with (c) a second gRNA molecule of any of claim 1-43 or 101-152.

254. The gRNA molecule of any of claims 251-253, wherein the gRNA molecule is used in combination with (d) a template nucleic acid of any of claims 153-163.

255. Use of a gRNA molecule of any of claims 1-43 in the manufacture of a medicament for treating Usher Syndrome or retinitis pigmentosa 39 in a subject.

256. The use of claim 255, wherein the medicament further comprises (b) a Cas9 molecule of any of claims 88-100.

257. The use of claim 255 or 256, wherein the medicament further comprises (c) a second gRNA molecule of any of claim 1-43 or 101-152.

258. The use of any of claims 255-257, wherein the the medicament further comprises (d) a template nucleic acid of any of claims 153-163.

259. A composition of any of claim 212-215 for use in treating Usher Syndrome or retinitis pigmentosa 39 in a subject.

260. A reaction mixture comprising a gRNA, a nucleic acid, or a composition described herein, and a cell from a subject having or likely to develop Usher Syndrome or retinitis pigmentosa-39, or a subject having a mutation in the USH2A gene, e.g., a deletion of guanine at nucleotide positon 2299 (2299delG).

261. A kit comprising, (a) gRNA molecule of any of claims 1-43, or nucleic acid that encodes said gRNA, and one or more of the following: (b) a Cas9 molecule of any of claims 88-100; (c) a second gRNA molecule of any of claim 1-43 or 101-152; (d) a template nucleic of any of claims 153-163; and (e) nucleic acid that encodes one or more of (b), (c), or (d).

262. The kit of claim 261, comprising nucleic acid that encodes one or more of (a), (b) and (c).

263. The kit of claim 261 or 262, further comprising a template nucleic acid that is a single strand DNA.

264. A non-naturally occurring template nucleic acid of any of claims 153-163.

The application's sequence listing, which the Patent Office published only in electronic form, follows.

SEQUENCE LISTING (941 sequences)

SEQ ID NO: 1 - protein, 1344 aa, Streptococcus mutans
KKPYSIGLDIGTNSVGWAVVTDDYKVPAKKMKVLGNTDKSHIEKNLLGALLFDSGNTAEDRRLKRTARRRYTRRRNRILYLQEIFSEEMGKVDDSFFHRLEDSFLVTEDKRGERHPIFGNLEEEVKYHENFPTIYHLRQYLADNPEKVDLRLVYLALAHIIKFRGHFLIEGKFDTRNNDVQRLFQEFLAVYDNTFENSSLQEQNVQVEEILTDKISKSAKKDRVLKLFPNEKSNGRFAEFLKLIVGNQADFKKHFELEEKAPLQFSKDTYEEELEVLLAQIGDNYAELFLSAKKLYDSILLSGILTVTDVGTKAPLSASMIQRYNEHQMDLAQLKQFIRQKLSDKYNEVFSDVSKDGYAGYIDGKTNQEAFYKYLKGLLNKIEGSGYFLDKIEREDFLRKQRTFDNGSIPHQIHLQEMRAIIRRQAEFYPFLADNQDRIEKLLTFRIPYYVGPLARGKSDFAWLSRKSADKITPWNFDEIVDKESSAEAFINRMTNYDLYLPNQKVLPKHSLLYEKFTVYNELTKVKYKTEQGKTAFFDANMKQEIFDGVFKVYRKVTKDKLMDFLEKEFDEFRIVDLTGLDKENKVFNASYGTYHDLCKILDKDFLDNSKNEKILEDIVLTLTLFEDREMIRKRLENYSDLLTKEQVKKLERRHYTGWGRLSAELIHGIRNKESRKTILDYLIDDGNSNRNFMQLINDDALSFKEEIAKAQVIGETDNLNQVVSDIAGSPAIKKGILQSLKIVDELVKIMGHQPENIVVEMARENQFTNQGRRNSQQRLKGLTDSIKEFGSQILKEHPVENSQLQNDRLFLYYLQNGRDMYTGEELDIDYLSQYDIDHIIPQAFIKDNSIDNRVLTSSKENRGKSDDVPSKDVVRKMKSYWSKLLSAKLITQRKFDNLTKAERGGLTDDDKAGFIKRQLVETRQITKHVARILDERFNTETDENNKKIRQVKIVTLKSNLVSNFRKEFELYKVREINDYHHAHDAYLNAVIGKALLGVYPQLEPEFVYGDYPHFHGHKENKATAKKFFYSNIMNFFKKDDVRTDKNGEIIWKKDEHISNIKKVLSYPQVNIVKKVEEQTGGFSKESILPKGNSDKLIPRKTKKFYWDTKKYGGFDSPIVAYSILVIADIEKGKSKKLKTVKALVGVTIMEKMTFERDPVAFLERKGYRNVQEENIIKLPKYSLFKLENGRKRLLASARELQKGNEIVLPNHLGTLLYHAKNIHKVDEPKHLDYVDKHKDEFKELLDVVSNFSKKYTLAEGNLEKIKELYAQNNGEDLKELASSFINLLTFTAIGAPATFKFFDKNIDRKRYTSTTEILNATLIHQSITGLYETRIDLNKLGGD

SEQ ID NO: 2 - protein, 1367 aa, Streptococcus pyogenes
DKKYSIGLDIGTNSVGWAVITDEYKVPSKKFKVLGNTDRHSIKKNLIGALLFDSGETAEATRLKRTARRRYTRRKNRICYLQEIFSNEMAKVDDSFFHRLEESFLVEEDKKHERHPIFGNIVDEVAYHEKYPTIYHLRKKLVDSTDKADLRLIYLALAHMIKFRGHFLIEGDLNPDNSDVDKLFIQLVQTYNQLFEENPINASGVDAKAILSARLSKSRRLENLIAQLPGEKKNGLFGNLIALSLGLTPNFKSNFDLAEDAKLQLSKDTYDDDLDNLLAQIGDQYADLFLAAKNLSDAILLSDILRVNTEITKAPLSASMIKRYDEHHQDLTLLKALVRQQLPEKYKEIFFDQSKNGYAGYIDGGASQEEFYKFIKPILEKMDGTEELLVKLNREDLLRKQRTFDNGSIPHQIHLGELHAILRRQEDFYPFLKDNREKIEKILTFRIPYYVGPLARGNSRFAWMTRKSEETITPWNFEEVVDKGASAQSFIERMTNFDKNLPNEKVLPKHSLLYEYFTVYNELTKVKYVTEGMRKPAFLSGEQKKAIVDLLFKTNRKVTVKQLKEDYFKKIECFDSVEISGVEDRFNASLGTYHDLLKIIKDKDFLDNEENEDILEDIVLTLTLFEDREMIEERLKTYAHLFDDKVMKQLKRRRYTGWGRLSRKLINGIRDKQSGKTILDFLKSDGFANRNFMQLIHDDSLTFKEDIQKAQVSGQGDSLHEHIANLAGSPAIKKGILQTVKVVDELVKVMGRHKPENIVIEMARENQTTQKGQKNSRERMKRIEEGIKELGSQILKEHPVENTQLQNEKLYLYYLQNGRDMYVDQELDINRLSDYDVDHIVPQSFLKDDSIDNKVLTRSDKNRGKSDNVPSEEVVKKMKNYWRQLLNAKLITQRKFDNLTKAERGGLSELDKAGFIKRQLVETRQITKHVAQILDSRMNTKYDENDKLIREVKVITLKSKLVSDFRKDFQFYKVREINNYHHAHDAYLNAVVGTALIKKYPKLESEFVYGDYKVYDVRKMIAKSEQEIGKATAKYFFYSNIMNFFKTEITLANGEIRKRPLIETNGETGEIVWDKGRDFATVRKVLSMPQVNIVKKTEVQTGGFSKESILPKRNSDKLIARKKDWDPKKYGGFDSPTVAYSVLVVAKVEKGKSKKLKSVKELLGITIMERSSFEKNPIDFLEAKGYKEVKKDLIIKLPKYSLFELENGRKRMLASAGELQKGNELALPSKYVNFLYLASHYEKLKGSPEDNEQKQLFVEQHKHYLDEIIEQISEFSKRVILADANLDKVLSAYNKHRDKPIREQAENIIHLFTLTNLGAPAAFKYFDTTIDRKRYTSTKEVLDATLIHQSITGLYETRIDLSQLGGD

SEQ ID NO: 3 - protein, 1387 aa, Streptococcus thermophilus
TKPYSIGLDIGTNSVGWAVTTDNYKVPSKKMKVLGNTSKKYIKKNLLGVLLFDSGITAEGRRLKRTARRRYTRRRNRILYLQEIFSTEMATLDDAFFQRLDDSFLVPDDKRDSKYPIFGNLVEEKAYHDEFPTIYHLRKYLADSTKKADLRLVYLALAHMIKYRGHFLIEGEFNSKNNDIQKNFQDFLDTYNAIFESDLSLENSKQLEEIVKDKISKLEKKDRILKLFPGEKNSGIFSEFLKLIVGNQADFRKCFNLDEKASLHFSKESYDEDLETLLGYIGDDYSDVFLKAKKLYDAILLSGFLTVTDNETEAPLSSAMIKRYNEHKEDLALLKEYIRNISLKTYNEVFKDDTKNGYAGYIDGKTNQEDFYVYLKKLLAEFEGADYFLEKIDREDFLRKQRTFDNGSIPYQIHLQEMRAILDKQAKFYPFLAKNKERIEKILTFRIPYYVGPLARGNSDFAWSIRKRNEKITPWNFEDVIDKESSAEAFINRMTSFDLYLPEEKVLPKHSLLYETFNVYNELTKVRFIAESMRDYQFLDSKQKKDIVRLYFKDKRKVTDKDIIEYLHAIYGYDGIELKGIEKQFNSSLSTYHDLLNIINDKEFLDDSSNEAIIEEIIHTLTIFEDREMIKQRLSKFENIFDKSVLKKLSRRHYTGWGKLSAKLINGIRDEKSGNTILDYLIDDGISNRNFMQLIHDDALSFKKKIQKAQIIGDEDKGNIKEVVKSLPGSPAIKKGILQSIKIVDELVKVMGGRKPESIVVEMARENQYTNQGKSNSQQRLKRLEKSLKELGSKILKENIPAKLSKIDNNALQNDRLYLYYLQNGKDMYTGDDLDIDRLSNYDIDHIIPQAFLKDNSIDNKVLVSSASNRGKSDDVPSLEVVKKRKTFWYQLLKSKLISQRKFDNLTKAERGGLSPEDKAGFIQRQLVETRQITKHVARLLDEKFNNKKDENNRAVRTVKIITLKSTLVSQFRKDFELYKVREINDFHHAHDAYLNAVVASALLKKYPKLEPEFVYGDYPKYNSFRERKSATEKVYFYSNIMNIFKKSISLADGRVIERPLIEVNEETGESVWNKESDLATVRRVLSYPQVNVVKKVEEQNHGLDRGKPKGLFNANLSSKPKPNSNENLVGAKEYLDPKKYGGYAGISNSFTVLVKGTIEKGAKKKITNVLEFQGISILDRINYRKDKLNFLLEKGYKDIELIIELPKYSLFELSDGSRRMLASILSTNNKRGEIHKGNQIFLSQKFVKLLYHAKRISNTINENHRKYVENHKKEFEELFYYILEFNENYVGAKKNGKLLNSAFQSWQNHSIDELCSSFIGPTGSERKGLFELTSRGSAADFEFLGVKIPRYRDYTPSSLLKDATLIHQSVTGLYETRIDLAKLGEG

SEQ ID NO: 4 - protein, 1333 aa, Listeria innocua
KKPYTIGLDIGTNSVGWAVLTDQYDLVKRKMKIAGDSEKKQIKKNFWGVRLFDEGQTAADRRMARTARRRIERRRNRISYLQGIFAEEMSKTDANFFCRLSDSFYVDNEKRNSRHPFFATIEEEVEYHKNYPTIYHLREELVNSSEKADLRLVYLALAHIIKYRGNFLIEGALDTQNTSVDGIYKQFIQTYNQVFASGIEDGSLKKLEDNKDVAKILVEKVTRKEKLERILKLYPGEKSAGMFAQFISLIVGSKGNFQKPFDLIEKSDIECAKDSYEEDLESLLALIGDEYAELFVAAKNAYSAVVLSSIITVAETETNAKLSASMIERFDTHEEDLGELKAFIKLHLPKHYEEIFSNTEKHGYAGYIDGKTKQADFYKYMKMTLENIEGADYFIAKIEKENFLRKQRTFDNGAIPHQLHLEELEAILHQQAKYYPFLKENYDKIKSLVTFRIPYFVGPLANGQSEFAWLTRKADGEIRPWNIEEKVDFGKSAVDFIEKMTNKDTYLPKENVLPKHSLCYQKYLVYNELTKVRYINDQGKTSYFSGQEKEQIFNDLFKQKRKVKKKDLELFLRNMSHVESPTIEGLEDSFNSSYSTYHDLLKVGIKQEILDNPVNTEMLENIVKILTVFEDKRMIKEQLQQFSDVLDGVVLKKLERRHYTGWGRLSAKLLMGIRDKQSHLTILDYLMNDDGLNRNLMQLINDSNLSFKSIIEKEQVTTADKDIQSIVADLAGSPAIKKGILQSLKIVDELVSVMGYPPQTIVVEMARENQTTGKGKNNSRPRYKSLEKAIKEFGSQILKEHPTDNQELRNNRLYLYYLQNGKDMYTGQDLDIHNLSNYDIDHIVPQSFITDNSIDNLVLTSSAGNREKGDDVPPLEIVRKRKVFWEKLYQGNLMSKRKFDYLTKAERGGLTEADKARFIHRQLVETRQITKNVANILHQRFNYEKDDHGNTMKQVRIVTLKSALVSQFRKQFQLYKVRDVNDYHHAHDAYLNGVVANTLLKVYPQLEPEFVYGDYHQFDWFKANKATAKKQFYTNIMLFFAQKDRIIDENGEILWDKKYLDTVKKVMSYRQMNIVKKTEIQKGEFSKATIKPKGNSSKLIPRKTNWDPMKYGGLDSPNMAYAVVIEYAKGKNKLVFEKKIIRVTIMERKAFEKDEKAFLEEQGYRQPKVLAKLPKYTLYECEEGRRRMLASANEAQKGNQQVLPNHLVTLLHHAANCEVSDGKSLDYIESNREMFAELLAHVSEFAKRYTLAEANLNKINQLFEQNKEGDIKAIAQSFVDLMAFNAMGAPASFKFFETTIERKRYNNLKELLNSTIIYQSITGLYESRKRLDD

SEQ ID NO: 5 - RNA, 96 nt, Artificial Sequence
  source: /note="Description of Artificial Sequence: Synthetic oligonucleotide"
  modified_base (1)..(20): a, c, u, g, unknown or other
nnnnnnnnnnnnnnnnnnnnguuuuagagcuagaaauagcaaguuaaaauaaggcuaguccguuaucaacuugaaaaaguggcaccgagucggugc

SEQ ID NO: 6 - protein, 1082 aa, Neisseria meningitidis
MAAFKPNSINYILGLDIGIASVGWAMVEIDEEENPIRLIDLGVRVFERAEVPKTGDSLAMARRLARSVRRLTRRRAHRLLRTRRLLKREGVLQAANFDENGLIKSLPNTPWQLRAAALDRKLTPLEWSAVLLHLIKHRGYLSQRKNEGETADKELGALLKGVAGNAHALQTGDFRTPAELALNKFEKESGHIRNQRSDYSHTFSRKDLQAELILLFEKQKEFGNPHVSGGLKEGIETLLMTQRPALSGDAVQKMLGHCTFEPAEPKAAKNTYTAERFIWLTKLNNLRILEQGSERPLTDTERATLMDEPYRKSKLTYAQARKLLGLEDTAFFKGLRYGKDNAEASTLMEMKAYHAISRALEKEGLKDKKSPLNLSPELQDEIGTAFSLFKTDEDITGRLKDRIQPEILEALLKHISFDKFVQISLKALRRIVPLMEQGKRYDEACAEIYGDHYGKKNTEEKIYLPPIPADEIRNPVVLRALSQARKVINGVVRRYGSPARIHIETAREVGKSFKDRKEIEKRQEENRKDREKAAAKFREYFPNFVGEPKSKDILKLRLYEQQHGKCLYSGKEINLGRLNEKGYVEIDHALPFSRTWDDSFNNKVLVLGSENQNKGNQTPYEYFNGKDNSREWQEFKARVETSRFPRSKKQRILLQKFDEDGFKERNLNDTRYVNRFLCQFVADRMRLTGKGKKRVFASNGQITNLLRGFWGLRKVRAENDRHHALDAVVVACSTVAMQQKITRFVRYKEMNAFDGKTIDKETGEVLHQKTHFPQPWEFFAQEVMIRVFGKPDGKPEFEEADTLEKLRTLLAEKLSSRPEAVHEYVTPLFVSRAPNRKMSGQGHMETVKSAKRLDEGVSVLRVPLTQLKLKDLEKMVNREREPKLYEALKARLEAHKDDPAKAFAEPFYKYDKAGNRTQQVKAVRVEQVQKTGVWVRNHNGIADNATMVRVDVFEKGDKYYLVPIYSWQVAKGILPDRAVVQGKDEEDWQLIDDSFNFKFSLHPNDLVEVITKKARMFGYFASCHRGTGNINIRIHDLDHKIGKNGILEGIGVKTALSFQKYQIDELGKEIRPCRLKKRPPVR

SEQ ID NO: 7 - protein, 1368 aa, Streptococcus pyogenes [sequence omitted]

SEQ ID NO: 8 - protein, 12 aa, Artificial Sequence
  source: /note="Description of Artificial Sequence: Synthetic peptide"
  VARIANT (2)..(2): /replace="Val" or "Met" or "Leu" or "Thr"
  VARIANT (4)..(4): /replace="Ile" or "Val" or "Ser" or "Asn" or "Tyr" or "Glu" or "Leu"
  VARIANT (5)..(5): /replace="Ser" or "Gly" or "Ala" or "Asp" or "Thr" or "Arg" or "Met" or "Phe"
  VARIANT (6)..(6): /replace="Tyr" or "Asn" or "Phe"
  VARIANT (7)..(7): /replace="Ile" or "Leu" or "Cys" or "Thr" or "Phe"
  VARIANT (9)..(9): /replace="Phe" or "Val" or "Tyr" or "Ser" or "Leu"
  VARIANT (10)..(10): /replace="Ser" or "Cys" or "Val" or "Gly"
  VARIANT (11)..(11): /replace="Ile" or "Leu" or "Ala" or "Met" or "His"
  MOD_RES (12)..(12): Any amino acid or absent
  misc_feature (1)..(12): /note="Variant residues given in the sequence have no preference with respect to those in the annotations for variant positions"
DIGTNSVGWAVX

SEQ ID NO: 9 - protein, 12 aa, Artificial Sequence
  source: /note="Description of Artificial Sequence: Synthetic peptide"
  VARIANT (2)..(2): /replace="Val" or "Met" or "Leu" or "Thr"
  VARIANT (4)..(4): /replace="Ile" or "Val" or "Ser" or "Asn" or "Tyr" or "Glu" or "Leu"
  VARIANT (5)..(5): /replace="Ser" or "Gly" or "Ala" or "Asp" or "Thr" or "Arg" or "Met" or "Phe"
  VARIANT (7)..(7): /replace="Ile" or "Leu" or "Cys" or "Thr" or "Phe"
  VARIANT (9)..(9): /replace="Phe" or "Val" or "Tyr" or "Ser" or "Leu"
  VARIANT (10)..(10): /replace="Ser" or "Cys" or "Val" or "Gly"
  VARIANT (11)..(11): /replace="Ile" or "Leu" or "Ala" or "Met" or "His"
  MOD_RES (12)..(12): Any amino acid or absent
  misc_feature (1)..(12): /note="Variant residues given in the sequence have no preference with respect to those in the annotations for variant positions"
DIGTNSVGWAVX

SEQ ID NO: 10 - protein, 12 aa, Artificial Sequence
  source: /note="Description of Artificial Sequence: Synthetic peptide"
  VARIANT (4)..(4): /replace="Ile" or "Val" or "Ser" or "Asn" or "Tyr" or "Glu" or "Leu"
  VARIANT (5)..(5): /replace="Ser" or "Gly" or "Ala" or "Asp" or "Thr" or "Arg" or "Met" or "Phe"
  VARIANT (11)..(11): /replace="Ile" or "Leu" or "Ala" or "Met" or "His"
  MOD_RES (12)..(12): Any amino acid or absent
  misc_feature (1)..(12): /note="Variant residues given in the sequence have no preference with respect to those in the annotations for variant positions"
DIGTNSVGWAVX

SEQ ID NO: 11 - protein, 12 aa, Artificial Sequence
  source: /note="Description of Artificial Sequence: Synthetic peptide"
  MOD_RES (12)..(12): Any non-polar alkyl amino acid or a hydroxyl amino acid
DIGTNSVGWAVX

SEQ ID NO: 12 - protein, 8 aa, Artificial Sequence
  source: /note="Description of Artificial Sequence: Synthetic peptide"
  VARIANT (2)..(2): /replace="His
  VARIANT (3)..(3): /replace="Leu" or "Val"
  VARIANT (5)..(5): /replace="Thr"
  misc_feature (1)..(8): /note="Variant residues given in the sequence have no preference with respect to those in the annotations for variant positions"
IVIEMARE

SEQ ID NO: 13 - protein, 8 aa, Artificial Sequence
  source: /note="Description of Artificial Sequence: Synthetic peptide"
  VARIANT (3)..(3): /replace="Leu" or "Val"
  misc_feature (1)..(8): /note="Variant residues given in the sequence have no preference with respect to those in the annotations for variant positions"
IVIEMARE

SEQ ID NO: 14 - protein, 8 aa, Artificial Sequence
  source: /note="Description of Artificial Sequence: Synthetic peptide"
  VARIANT (4)..(4): /replace="Leu"
  VARIANT (7)..(7): /replace="Val"
  VARIANT (8)..(8): /replace="Val"
  misc_feature (1)..(8): /note="Variant residues given in the sequence have no preference with respect to those in the annotations for variant positions"
HHAHDARE

SEQ ID NO: 15 - protein, 8 aa, Artificial Sequence
  source: /note="Description of Artificial Sequence: Synthetic peptide"
HHAHDAYL

SEQ ID NO: 16 - protein, 30 aa, Artificial Sequence
  source: /note="Description of Artificial Sequence: Synthetic polypeptide"
  VARIANT (2)..(2): /replace="Pro"
  VARIANT (4)..(4): /replace="Leu" or "Ile" or "Phe"
  VARIANT (5)..(5): /replace="Ala" or "Ser"
  VARIANT (6)..(6): /replace="Ile" or "Val" or "Phe"
  MOD_RES (7)..(26): Any amino acid and this region may encompass 5-20 residues wherein some positions may be absent
  VARIANT (29)..(29): /replace="Glu" or "Asn" or "Gln"
  source: /note="See specification as filed for detailed description of substitutions and preferred embodiments
  misc_feature (1)..(30): /note="Variant residues given in the sequence have no preference with respect to those in the annotations for variant positions"
KKYVGLXXXXXXXXXXXXXXXXXXXXTDDY

SEQ ID NO: 17 - protein, 27 aa, Artificial Sequence
  source: /note="Description of Artificial Sequence: Synthetic peptide"
  VARIANT (1)..(1): /replace="Glu" or "Gln" or "Asn"
  VARIANT (2)..(2): /replace="Ile" or "Arg" or "Gln" or "Val" or "Met" or "Lys"
  VARIANT (3)..(3): /replace="Glu"
  VARIANT (5)..(5): /replace="Val" or "Thr" or "Ala" or "Leu"
  VARIANT (6)..(6): /replace="Tyr" or "Ile" or "Leu" or "Phe" or "Trp"
  VARIANT (8)..(8): /replace="His" or "Arg" or "Lys" or "Tyr" or "Ile" or "Leu" or "Phe" or "Trp"
  VARIANT (9)..(9): /replace="Ala" or "Asp" or "Thr" or "Lys"
  VARIANT (10)..(10): /replace="Leu" or "Val" or "Lys" or "Tyr" or "Met" or "Ile" or "Arg" or "Ala" or "Glu" or "Asp" or "Gln"
  VARIANT (11)..(11): /replace="Arg" or "Thr" or "Ile" or "Val" or "Ser" or "Cys" or "Tyr" or "Lys" or "Phe" or "Gly"
  VARIANT (12)..(12): /replace="Gln" or "Tyr" or "Thr" or "Phe" or "Leu" or "Trp" or "Met" or "Ala" or "Glu" or "Gly" or "Ser"
  VARIANT (13)..(13): /replace="Ser" or "Asn" or "Arg" or "Leu" or "Thr"
  VARIANT (14)..(14): /replace="Asn" or "Ser"
  VARIANT (15)..(15): /replace="Ala" or "Thr" or "Gly" or "Arg"
  VARIANT (16)..(16): /replace="Leu" or "Phe" or "Ser" or "Arg" or "Tyr" or "Gln" or "Trp" or "Asp" or "Lys" or "His"
  VARIANT (17)..(17): /replace="Ser" or "Ile" or "Asn" or "Glu" or "Ala" or "His" or "Phe" or "Leu" or "Gln" or "Met" or "Gly" or "Tyr" or "Val"
  VARIANT (19)..(19): /replace="Leu" or "Arg" or "Met" or "Thr" or "Phe"
  VARIANT (20)..(20): /replace="Leu" or "Ile" or "Ala" or "Thr"
  VARIANT (21)..(21): /replace="Ile" or "Val" or "Ala"
  VARIANT (22)..(22): /replace="Val" or "Cys" or "Glu" or "Ser" or "Ala"
  VARIANT (23)..(23): /replace="Phe" or "Thr" or "Trp" or "Glu" or "Leu" or "Asn" or "Cys" or "Lys" or "Val" or "Ser" or "Gln" or "Ile" or "Tyr" or "His" or "Ala"
  VARIANT (24)..(24): /replace="Pro" or "Arg" or "Lys" or "Asn" or "Ala" or "His" or "Gln" or "Gly" or "Leu"
  VARIANT (25)..(25): /replace="Gly" or "Thr" or "Asn" or "Ser" or "Lys" or "Ala" or "Ile" or "Glu" or "Leu" or "Gln" or " Arg" or "Tyr"
  VARIANT (26)..(26): /replace="Val" or "Ala" or "Glu" or "Tyr" or "Ile" or "Cys" or "Leu" or "Ser" or "Thr" or "Gly" or "Lys" or "Met" or "Asp" or "Phe"
  misc_feature (1)..(27): /note="Variant residues given in the sequence have no preference with respect to those in the annotations for variant positions"
DLDHIVPQSFLKDDSIDNKVLTRSDKN

SEQ ID NO: 18 - protein, 27 aa, Artificial Sequence
  source: /note="Description of Artificial Sequence: Synthetic peptide"
  VARIANT (1)..(1): /replace="Glu
  VARIANT (2)..(2): /replace="Ile" or "Arg" or "Gln" or "Val" or "Met" or "Lys"
  VARIANT (3)..(3): /replace="Glu
  VARIANT (5)..(5): /replace="Val" or "Thr" or "Ala" or "Leu"
  VARIANT (6)..(6): /replace="Tyr" or "Ile" or "Leu" or "Phe" or "Trp"
  VARIANT (8)..(8): /replace="His" or "Arg" or "Lys" or "Tyr" or "Ile" or "Leu" or "Phe" or "Trp"
  VARIANT (10)..(10): /replace="Leu" or "Val" or "Lys" or "Tyr" or "Met" or "Ile" or "Arg" or "Ala" or "Glu" or "Asp" or "Gln"
  VARIANT (11)..(11): /replace="Arg" or "Thr" or "Ile" or "Val" or "Ser" or "Cys" or "Tyr" or "Lys" or "Phe" or "Gly"
  VARIANT (12)..(12): /replace="Gln" or "Tyr" or "Thr" or "Phe" or "Leu" or "Trp" or "Met" or "Ala" or "Glu" or "Gly" or "Ser"
  VARIANT (16)..(16): /replace="Leu" or "Phe" or "Ser" or "Arg" or "Tyr" or "Gln" or "Trp" or "Asp" or "Lys" or "His"
  VARIANT (17)..(17): /replace="Ser" or "Ile" or "Asn" or "Glu" or "Ala" or "His" or "Phe" or "Leu" or "Gln" or "Met" or "Gly" or Tyr" or "Val"
  VARIANT (22)..(22): /replace="Val" or "Cys" or "Glu" or "Ser" or "Ala"
  VARIANT (23)..(23): /replace="Phe" or "Thr" or "Trp" or "Glu" or "Leu" or "Asn" or "Cys" or "Lys" or "Val" or "Ser" or "Gln" or "Ile" or "Tyr" or "His" or "Ala"
  VARIANT (24)..(24): /replace="Pro" or "Arg" or "Lys" or "Asn" or "Ala" or "His" or "Gln" or "Gly" or "Leu"
  VARIANT (25)..(25): /replace="Gly" or "Thr" or "Asn" or "Ser" or "Lys" or "Ala" or "Ile" or "Glu" or "Leu" or "Gln" or "Arg" or "Tyr"
  VARIANT (26)..(26): /replace="Val" or "Ala" or "Glu" or "Tyr" or "Ile" or "Cys" or "Leu" or "Ser" or "Thr" or "Gly" or "Lys" "Met" or "Asp" or "Phe"
  misc_feature (1)..(27): /note="Variant residues given in the sequence have no preference with respect to those in the annotations for variant positions"
DLDHIVPQSFLKDDSIDNKVLTRSDKN

SEQ ID NO: 19 - protein, 27 aa, Artificial Sequence
  source: /note="Description of Artificial Sequence: Synthetic peptide"
  VARIANT (1)..(1): /replace="Glu"
  VARIANT (3)..(3): /replace="Glu"
  VARIANT (8)..(8): /replace="His" or "Arg" or "Lys" or "Tyr" or "Ile" or "Leu" or "Trp"
  VARIANT (10)..(10): /replace="Leu" or "Val" or "Lys" or "Tyr" or "Met" or "Ile" or "Arg" or "Ala" or "Glu" or "Asp" or "Gln"
  VARIANT (11)..(11): /replace="Arg" or "Thr" or "Ile" or "Val" or "Ser" or "Cys" or "Tyr" or "Lys" or "Phe" or "Gly"
  VARIANT (12)..(12): /replace="Gln" or "Tyr" or "Thr" or "Phe" or "Leu" or "Trp" or "Met" or "Ala" or "Glu" or "Gly" or "Ser"
  VARIANT (16)..(16): /replace="Leu" or "Phe" or "Ser" or "Arg" or "Tyr" or "Gln" or "Trp" or "Asp" or "Lys" or "His"
  VARIANT (17)..(17): /replace="Ser" or "Ile" or "Asn" or "Glu" or "Ala" or "His" or "Phe" or "Leu" or "Gln" or "Met" or "Gly" or "Tyr" or "Val"
  VARIANT (23)..(23): /replace="Phe" or "Thr" or "Trp" or "Glu" or "Leu" or "Asn" or "Cys" or "Lys" or "Val" or "Ser" or "Gln" or "Ile" or "Tyr" or "His" or "Ala"
  VARIANT (24)..(24): /replace="Pro" or "Arg" or "Lys" or "Asn" or "Ala" or "His" or "Gln" or "Gly" or "Leu"
  VARIANT (25)..(25): /replace="Gly" or "Thr" or "Asn" or "Ser" or "Lys" or "Ala" or "Ile" or "Glu" or "Leu" or "Gln" or "Arg" or "Tyr"
  VARIANT (26)..(26): /replace="Val" or "Ala" or "Glu" or "Tyr" or "Ile" or "Cys" or "Leu" or "Ser" or "Thr" or "Gly" or "Lys" or "Met" or "Asp" or "Phe"
  misc_feature (1)..(27): /note="Variant residues given in the sequence have no preference with respect to those in the annotations for variant positions"
DVDHIVPQSFLKDDSIDNKVLTRSDKN

SEQ ID NO: 20 - protein, 27 aa, Artificial Sequence
  source: /note="Description of Artificial Sequence: Synthetic peptide"
  VARIANT (2)..(2): /replace="Val"
  VARIANT (6)..(6): /replace="Val"
  VARIANT (9)..(9): /replace="Ser"
  VARIANT (11)..(11): /replace="Leu"
  VARIANT (12)..(12): /replace="Thr"
  VARIANT (14)..(14): /replace="Asn"
  VARIANT (19)..(19): /replace="Lys" or "Leu"
  VARIANT (22)..(22): /replace="Val"
  VARIANT (23)..(23): /replace="Arg"
  VARIANT (25)..(25): /replace="Asp" or "Ala"
  VARIANT (26)..(26): /replace="Lys" or "Gly" or "Asn"
  misc_feature (1)..(27): /note="Variant residues given in the sequence have no preference with respect to those in the annotations for variant positions"
DIDHIIPQAFIKDDSIDNRVLTSSKEN

SEQ ID NO: 21 - protein, 73 aa, Artificial Sequence
  source: /note="Description of Artificial Sequence: Synthetic polypeptide"
  VARIANT (8)..(8): /replace="Arg"
  VARIANT (12)..(12): /replace="Thr"
  VARIANT (13)..(13): /replace="Asp"
  VARIANT (14)..(14): /replace="Gln" or "Asp"
  VARIANT (15)..(15): /replace="Asp"
  VARIANT (19)..(19): /replace="Asn" or "His"
  VARIANT (20)..(20): /replace="Arg" or "Asn"
  VARIANT (23)..(23): /replace="Asp" or "Asn"
  MOD_RES (25)..(64): Any amino acid and this region may encompass 15-40 residues wherein some positions may be absent
  VARIANT (67)..(67): /replace="Glu"
  VARIANT (69)..(69): /replace="Gly"
  VARIANT (71)..(71): /replace="Asn"
  source: /note="See specification as filed for detailed description of substitutions and preferred embodiments"
  misc_feature (1)..(73): /note="Variant residues given in the sequence have no preference with respect to those in the annotations for variant positions"
LYYLQNGKDMYVGEELDIDYLSQYXXXXXXXXXXXXXXXXXXXXXXXXXXXXXXXXXXXXXXXXNRGKSDDVP

SEQ ID NO: 22 - DNA, 4107 bp, Artificial Sequence
  source: /note="Description of Artificial Sequence: Synthetic polynucleotide"
atggataaaaagtacagcatcgggctggacatcggtacaaactcagtggggtgggccgtgattacggacgagtacaaggtaccctccaaaaaatttaaagtgctgggtaacacggacagacactctataaagaaaaatcttattggagccttgctgttcgactcaggcgagacagccgaagccacaaggttgaagcggaccgccaggaggcggtataccaggagaaagaaccgcatatgctacctgcaagaaatcttcagtaacgagatggcaaaggttgacgatagctttttccatcgcctggaagaatcctttcttgttgaggaagacaagaagcacgaacggcaccccatctttggcaatattgtcgacgaagtggcatatcacgaaaagtacccgactatctaccacctcaggaagaagctggtggactctaccgataaggcggacctcagacttatttatttggcactcgcccacatgattaaatttagaggacatttcttgatcgagggcgacctgaacccggacaacagtgacgtcgataagctgttcatccaacttgtgcagacctacaatcaactgttcgaagaaaaccctataaatgcttcaggagtcgacgctaaagcaatcctgtccgcgcgcctctcaaaatctagaagacttgagaatctgattgctcagttgcccggggaaaagaaaaatggattgtttggcaacctgatcgccctcagtctcggactgaccccaaatttcaaaagtaacttcgacctggccgaagacgctaagctccagctgtccaaggacacatacgatgacgacctcgacaatctgctggcccagattggggatcagtacgccgatctctttttggcagcaaagaacctgtccgacgccatcctgttgagcgatatcttgagagtgaacaccgaaattactaaagcaccccttagcgcatctatgatcaagcggtacgacgagcatcatcaggatctgaccctgctgaaggctcttgtgaggcaacagctccccgaaaaatacaaggaaatcttctttgaccagagcaaaaacggctacgctggctatatagatggtggggccagtcaggaggaattctataaattcatcaagcccattctcgagaaaatggacggcacagaggagttgctggtcaaacttaacagggaggacctgctgcggaagcagcggacctttgacaacgggtctatcccccaccagattcatctgggcgaactgcacgcaatcctgaggaggcaggaggatttttatccttttcttaaagataaccgcgagaaaatagaaaagattcttacattcaggatcccgtactacgtgggacctctcgcccggggcaattcacggtttgcctggatgacaaggaagtcagaggagactattacaccttggaacttcgaagaagtggtggacaagggtgcatctgcccagtctttcatcgagcggatgacaaattttgacaagaacctccctaatgagaaggtgctgcccaaacattctctgctctacgagtactttaccgtctacaatgaactgactaaagtcaagtacgtcaccgagggaatgaggaagccggcattccttagtggagaacagaagaaggcgattgtagacctgttgttcaagaccaacaggaaggtgactgtgaagcaacttaaagaagactactttaagaagatcgaatgttttgacagtgtggaaatttcaggggttgaagaccgcttcaatgcgtcattggggacttaccatgatcttctcaagatcataaaggacaaagacttcctggacaacgaagaaaatgaggatattctcgaagacatcgtcctcaccctgaccctgttcgaagacagggaaatgatagaagagcgcttgaaaacctatgcccacctcttcgacgataaagttatgaagcagctgaagcgcaggagatacacaggatggggaagattgtcaaggaagctgatcaatggaattagggataaacagagtggcaagaccatactggatttcctcaaatctgatggcttcgccaataggaacttcatgcaactgattcacgatgactctcttaccttcaaggaggacattcaaaaggctcaggtgagcgggcagggagactcccttcatgaacacatcgcgaatttggcaggttcccccgctattaaaaagggcatccttcaaactgtcaaggtggtggatgaattggtcaaggtaatgggcagacataagccagaaaatattgtgatcgagatggcccgcgaaaaccagaccacacagaagggccagaaaaatagtagagagcggatgaagaggatcgaggagggcatcaaagagctgggatctcagattctcaaagaacaccccgtagaaaacacacagctgcagaacgaaaaattgtacttgtactatctgcagaacggcagagacatgtacgtcgaccaagaacttgatattaatagactgtccgactatgacgtagaccatatcgtgccccagtccttcctgaaggacgactccattgataacaaagtcttgacaagaagcgacaagaacaggggtaaaagtgataatgtgcctagcgaggaggtggtgaaaaaaatgaagaactactggcgacagctgcttaatgcaaagctcattacacaacggaagttcgataatctgacgaaagcagagagaggtggcttgtctgagttggacaaggcagggtttattaagcggcagctggtggaaactaggcagatcacaaagcacgtggcgcagattttggacagccggatgaacacaaaatacgacgaaaatgataaactgatacgagaggtcaaagttatcacgctgaaaagcaagctggtgtccgattttcggaaagacttccagttctacaaagttcgcgagattaataactaccatcatgctcacgatgcgtacctgaacgctgttgtcgggaccgccttgataaagaagtacccaaagctggaatccgagttcgtatacggggattacaaagtgtacgatgtgaggaaaatgatagccaagtccgagcaggagattggaaaggccacagctaagtacttcttttattctaacatcatgaatttttttaagacggaaattaccctggccaacggagagatcagaaagcggccccttatagagacaaatggtgaaacaggtgaaatcgtctgggataagggcagggatttcgctactgtgaggaaggtgctgagtatgccacaggtaaatatcgtgaaaaaaaccgaagtacagaccggaggattttccaaggaaagcattttgcctaaaagaaactcagacaagctcatcgcccgcaagaaagattgggaccctaagaaatacgggggatttgactcacccaccgtagcctattctgtgctggtggtagctaaggtggaaaaaggaaagtctaagaagctgaagtccgtgaaggaactcttgggaatcactatcatggaaagatcatcctttgaaaagaaccctatcgatttcctggaggctaagggttacaaggaggtcaagaaagacctcatcattaaactgccaaaatactctctcttcgagctggaaaatggcaggaagagaatgttggccagcgccggagagctgcaaaagggaaacgagcttgctctgccctccaaatatgttaattttctctatctcgcttcccactatgaaaagctgaaagggtctcccgaagataacgagcagaagcagctgttcgtcgaacagcacaagcactatctggatgaaataatcgaacaaataagcgagttcagcaaaagggttatcctggcggatgctaatttggacaaagtactgtctgcttataacaagcaccgggataagcctattagggaacaagccgagaatataattcacctctttacactcacgaatctcggagcccccgccgccttcaaatactttgatacgactatcgaccggaaacggtataccagtaccaaagaggtcctcgatgccaccctcatccaccagtcaattactggcctgtacgaaacacggatcgacctctctcaactgggcggcgactag

SEQ ID NO: 23 - protein, 1368 aa, Streptococcus pyogenes [sequence omitted]

SEQ ID NO: 24 - DNA, 3249 bp, Artificial Sequence
  source: /note="Description of Artificial Sequence: Synthetic polynucleotide"
atggccgccttcaagcccaaccccatcaactacatcctgggcctggacatcggcatcgccagcgtgggctgggccatggtggagatcgacgaggacgagaaccccatctgcctgatcgacctgggtgtgcgcgtgttcgagcgcgctgaggtgcccaagactggtgacagtctggctatggctcgccggcttgctcgctctgttcggcgccttactcgccggcgcgctcaccgccttctgcgcgctcgccgcctgctgaagcgcgagggtgtgctgcaggctgccgacttcgacgagaacggcctgatcaagagcctgcccaacactccttggcagctgcgcgctgccgctctggaccgcaagctgactcctctggagtggagcgccgtgctgctgcacctgatcaagcaccgcggctacctgagccagcgcaagaacgagggcgagaccgccgacaaggagctgggtgctctgctgaagggcgtggccgacaacgcccacgccctgcagactggtgacttccgcactcctgctgagctggccctgaacaagttcgagaaggagagcggccacatccgcaaccagcgcggcgactacagccacaccttcagccgcaaggacctgcaggccgagctgatcctgctgttcgagaagcagaaggagttcggcaacccccacgtgagcggcggcctgaaggagggcatcgagaccctgctgatgacccagcgccccgccctgagcggcgacgccgtgcagaagatgctgggccactgcaccttcgagccagccgagcccaaggccgccaagaacacctacaccgccgagcgcttcatctggctgaccaagctgaacaacctgcgcatcctggagcagggcagcgagcgccccctgaccgacaccgagcgcgccaccctgatggacgagccctaccgcaagagcaagctgacctacgcccaggcccgcaagctgctgggtctggaggacaccgccttcttcaagggcctgcgctacggcaaggacaacgccgaggccagcaccctgatggagatgaaggcctaccacgccatcagccgcgccctggagaaggagggcctgaaggacaagaagagtcctctgaacctgagccccgagctgcaggacgagatcggcaccgccttcagcctgttcaagaccgacgaggacatcaccggccgcctgaaggaccgcatccagcccgagatcctggaggccctgctgaagcacatcagcttcgacaagttcgtgcagatcagcctgaaggccctgcgccgcatcgtgcccctgatggagcagggcaagcgctacgacgaggcctgcgccgagatctacggcgaccactacggcaagaagaacaccgaggagaagatctacctgcctcctatccccgccgacgagatccgcaaccccgtggtgctgcgcgccctgagccaggcccgcaaggtgatcaacggcgtggtgcgccgctacggcagccccgcccgcatccacatcgagaccgcccgcgaggtgggcaagagcttcaaggaccgcaaggagatcgagaagcgccaggaggagaaccgcaaggaccgcgagaaggccgccgccaagttccgcgagtacttccccaacttcgtgggcgagcccaagagcaaggacatcctgaagctgcgcctgtacgagcagcagcacggcaagtgcctgtacagcggcaaggagatcaacctgggccgcctgaacgagaagggctacgtggagatcgaccacgccctgcccttcagccgcacctgggacgacagcttcaacaacaaggtgctggtgctgggcagcgagaaccagaacaagggcaaccagaccccctacgagtacttcaacggcaaggacaacagccgcgagtggcaggagttcaaggcccgcgtggagaccagccgcttcccccgcagcaagaagcagcgcatcctgctgcagaagttcgacgaggacggcttcaaggagcgcaacctgaacgacacccgctacgtgaaccgcttcctgtgccagttcgtggccgaccgcatgcgcctgaccggcaagggcaagaagcgcgtgttcgccagcaacggccagatcaccaacctgctgcgcggcttctggggcctgcgcaaggtgcgcgccgagaacgaccgccaccacgccctggacgccgtggtggtggcctgcagcaccgtggccatgcagcagaagatcacccgcttcgtgcgctacaaggagatgaacgccttcgacggtaaaaccatcgacaaggagaccggcgaggtgctgcaccagaagacccacttcccccagccctgggagttcttcgcccaggaggtgatgatccgcgtgttcggcaagcccgacggcaagcccgagttcgaggaggccgacacccccgagaagctgcgcaccctgctggccgagaagctgagcagccgccctgaggccgtgcacgagtacgtgactcctctgttcgtgagccgcgcccccaaccgcaagatgagcggtcagggtcacatggagaccgtgaagagcgccaagcgcctggacgagggcgtgagcgtgctgcgcgtgcccctgacccagctgaagctgaaggacctggagaagatggtgaaccgcgagcgcgagcccaagctgtacgaggccctgaaggcccgcctggaggcccacaaggacgaccccgccaaggccttcgccgagcccttctacaagtacgacaaggccggcaaccgcacccagcaggtgaaggccgtgcgcgtggagcaggtgcagaagaccggcgtgtgggtgcgcaaccacaacggcatcgccgacaacgccaccatggtgcgcgtggacgtgttcgagaagggcgacaagtactacctggtgcccatctacagctggcaggtggccaagggcatcctgcccgaccgcgccgtggtgcagggcaaggacgaggaggactggcagctgatcgacgacagcttcaacttcaagttcagcctgcaccccaacgacctggtggaggtgatcaccaagaaggcccgcatgttcggctacttcgccagctgccaccgcggcaccggcaacatcaacatccgcatccacgacctggaccacaagatcggcaagaacggcatcctggagggcatcggcgtgaagaccgccctgagcttccagaagtaccagatcgacgagctgggcaaggagatccgcccctgccgcctgaagaagcgccctcctgtgcgctaa

SEQ ID NO: 25 - protein, 1082 aa, Neisseria meningitidis
MAAFKPNPINYILGLDIGIASVGWAMVEIDEDENPICLIDLGVRVFERAEVPKTGDSLAMARRLARSVRRLTRRRAHRLLRARRLLKREGVLQAADFDENGLIKSLPNTPWQLRAAALDRKLTPLEWSAVLLHLIKHRGYLSQRKNEGETADKELGALLKGVADNAHALQTGDFRTPAELALNKFEKESGHIRNQRGDYSHTFSRKDLQAELILLFEKQKEFGNPHVSGGLKEGIETLLMTQRPALSGDAVQKMLGHCTFEPAEPKAAKNTYTAERFIWLTKLNNLRILEQGSERPLTDTERATLMDEPYRKSKLTYAQARKLLGLEDTAFFKGLRYGKDNAEASTLMEMKAYHAISRALEKEGLKDKKSPLNLSPELQDEIGTAFSLFKTDEDITGRLKDRIQPEILEALLKHISFDKFVQISLKALRRIVPLMEQGKRYDEACAEIYGDHYGKKNTEEKIYLPPIPADEIRNPVVLRALSQARKVINGVVRRYGSPARIHIETAREVGKSFKDRKEIEKRQEENRKDREKAAAKFREYFPNFVGEPKSKDILKLRLYEQQHGKCLYSGKEINLGRLNEKGYVEIDHALPFSRTWDDSFNNKVLVLGSENQNKGNQTPYEYFNGKDNSREWQEFKARVETSRFPRSKKQRILLQKFDEDGFKERNLNDTRYVNRFLCQFVADRMRLTGKGKKRVFASNGQITNLLRGFWGLRKVRAENDRHHALDAVVVACSTVAMQQKITRFVRYKEMNAFDGKTIDKETGEVLHQKTHFPQPWEFFAQEVMIRVFGKPDGKPEFEEADTPEKLRTLLAEKLSSRPEAVHEYVTPLFVSRAPNRKMSGQGHMETVKSAKRLDEGVSVLRVPLTQLKLKDLEKMVNREREPKLYEALKARLEAHKDDPAKAFAEPFYKYDKAGNRTQQVKAVRVEQVQKTGVWVRNHNGIADNATMVRVDVFEKGDKYYLVPIYSWQVAKGILPDRAVVQGKDEEDWQLIDDSFNFKFSLHPNDLVEVITKKARMFGYFASCHRGTGNINIRIHDLDHKIGKNGILEGIGVKTALSFQKYQIDELGKEIRPCRLKKRPPVR

SEQ ID NO: 26 - protein, 1053 aa, Staphylococcus aureus
MKRNYILGLDIGITSVGYGIIDYETRDVIDAGVRLFKEANVENNEGRRSKRGARRLKRRRRHRIQRVKKLLFDYNLLTDHSELSGINPYEARVKGLSQKLSEEEFSAALLHLAKRRGVHNVNEVEEDTGNELSTKEQISRNSKALEEKYVAELQLERLKKDGEVRGSINRFKTSDYVKEAKQLLKVQKAYHQLDQSFIDTYIDLLETRRTYYEGPGEGSPFGWKDIKEWYEMLMGHCTYFPEELRSVKYAYNADLYNALNDLNNLVITRDENEKLEYYEKFQIIENVFKQKKKPTLKQIAKEILVNEEDIKGYRVTSTGKPEFTNLKVYHDIKDITARKEIIENAELLDQIAKILTIYQSSEDIQEELTNLNSELTQEEIEQISNLKGYTGTHNLSLKAINLILDELWHTNDNQIAIFNRLKLVPKKVDLSQQKEIPTTLVDDFILSPVVKRSFIQSIKVINAIIKKYGLPNDIIIELAREKNSKDAQKMINEMQKRNRQTNERIEEIIRTTGKENAKYLIEKIKLHDMQEGKCLYSLEAIPLEDLLNNPFNYEVDHIIPRSVSFDNSFNNKVLVKQEENSKKGNRTPFQYLSSSDSKISYETFKKHILNLAKGKGRISKTKKEYLLEERDINRFSVQKDFINRNLVDTRYATRGLMNLLRSYFRVNNLDVKVKSINGGFTSFLRRKWKFKKERNKGYKHHAEDALIIANADFIFKEWKKLDKAKKVMENQMFEEKQAESMPEIETEQEYKEIFITPHQIKHIKDFKDYKYSHRVDKKPNRELINDTLYSTRKDDKGNTLIVNNLNGLYDKDNDKLKKLINKSPEKLLMYHHDPQTYQKLKLIMEQYGDEKNPLYKYYEETGNYLTKYSKKDNGPVIKKIKYYGNKLNAHLDITDDYPNSRNKVVKLSLKPYRFDVYLDNGVYKFVTVKNLDVIKKENYYEVNSKCYEEAKKLKKISNQAEFIASFYNNDLIKINGELYRVIGVNNDLLNRIEVNMIDITYREYLENMNDKRPPRIIKTIASKTQSIKKYSTDILGNLYEVKSKKHPQIIKKG

SEQ ID NO: 27 - RNA, 104 nt, Artificial Sequence
  source: /note="Description of Artificial Sequence: Synthetic polynucleotide"
  modified_base (1)..(20): a, c, u, g, unknown or other
nnnnnnnnnnnnnnnnnnnnguuuuagagcuaugcugaaaagcauagcaaguuaaaauaaggcuaguccguuaucaacuugaaaaaguggcaccgagucggugc

SEQ ID NO: 28 - RNA, 106 nt, Artificial Sequence
  source: /note="Description of Artificial Sequence: Synthetic polynucleotide"
  modified_base (1)..(20): a, c, u, g, unknown or other
nnnnnnnnnnnnnnnnnnnnguuuuagagcuaugcuggaaacagcauagcaaguuaaaauaaggcuaguccguuaucaacuugaaaaaguggcaccgagucggugc

SEQ ID NO: 29 - RNA, 116 nt, Artificial Sequence
  source: /note="Description of Artificial Sequence: Synthetic polynucleotide"
  modified_base (1)..(20): a, c, u, g, unknown or other
nnnnnnnnnnnnnnnnnnnnguuuuagagcuaugcuguuuuggaaacaaaacagcauagcaaguuaaaauaaggcuaguccguuaucaacuugaaaaaguggcaccgagucggugc

SEQ ID NO: 30 - RNA, 96 nt, Artificial Sequence
  source: /note="Description of Artificial Sequence: Synthetic oligonucleotide"
  modified_base (1)..(20): a, c, u, g, unknown or other
nnnnnnnnnnnnnnnnnnnnguauuagagcuagaaauagcaaguuaauauaaggcuaguccguuaucaacuugaaaaaguggcaccgagucggugc

SEQ ID NO: 31 - RNA, 96 nt, Artificial Sequence
  source: /note="Description of Artificial Sequence: Synthetic oligonucleotide"
  modified_base (1)..(20): a, c, u, g, unknown or other
nnnnnnnnnnnnnnnnnnnnguuuaagagcuagaaauagcaaguuuaaauaaggcuaguccguuaucaacuugaaaaaguggcaccgagucggugc

SEQ ID NO: 32 - RNA, 116 nt, Artificial Sequence
  source: /note="Description of Artificial Sequence: Synthetic polynucleotide"
  modified_base (1)..(20): a, c, u, g, unknown or other
nnnnnnnnnnnnnnnnnnnnguauuagagcuaugcuguauuggaaacaauacagcauagcaaguuaauauaaggcuaguccguuaucaacuugaaaaaguggcaccgagucggugc

SEQ ID NO: 33 - RNA, 47 nt, Artificial Sequence
  source: /note="Description of Artificial Sequence: Synthetic oligonucleotide"
aaggcuaguccguuaucaacuugaaaaaguggcaccgagucggugcu

SEQ ID NO: 34 - RNA, 49 nt, Artificial Sequence
  source: /note="Description of Artificial Sequence: Synthetic oligonucleotide"
aaggcuaguccguuaucaacuugaaaaaguggcaccgagucgguggugc

SEQ ID NO: 35 - RNA, 51 nt, Artificial Sequence
  source: /note="Description of Artificial Sequence: Synthetic oligonucleotide"
aaggcuaguccguuaucaacuugaaaaaguggcaccgagucggugcggauc

SEQ ID NO: 36 - RNA, 31 nt, Artificial Sequence
  source: /note="Description of Artificial Sequence: Synthetic oligonucleotide"
aaggcuaguccguuaucaacuugaaaaagug

SEQ ID NO: 37 - RNA, 18 nt, Artificial Sequence
  source: /note="Description of Artificial Sequence: Synthetic oligonucleotide"
aaggcuaguccguuauca

SEQ ID NO: 38 - RNA, 12 nt, Artificial Sequence
  source: /note="Description of Artificial Sequence: Synthetic oligonucleotide"
aaggcuaguccg

SEQ ID NO: 39 - DNA, 3159 bp, Artificial Sequence
  source: /note="Description of Artificial Sequence: Synthetic polynucleotide"
atgaaaaggaactacattctggggctggacatcgggattacaagcgtggggtatgggattattgactatgaaacaagggacgtgatcgacgcaggcgtcagactgttcaaggaggccaacgtggaaaacaatgagggacggagaagcaagaggggagccaggcgcctgaaacgacggagaaggcacagaatccagagggtgaagaaactgctgttcgattacaacctgctgaccgaccattctgagctgagtggaattaatccttatgaagccagggtgaaaggcctgagtcagaagctgtcagaggaagagttttccgcagctctgctgcacctggctaagcgccgaggagtgcataacgtcaatgaggtggaagaggacaccggcaacgagctgtctacaaaggaacagatctcacgcaatagcaaagctctggaagagaagtatgtcgcagagctgcagctggaacggctgaagaaagatggcgaggtgagagggtcaattaataggttcaagacaagcgactacgtcaaagaagccaagcagctgctgaaagtgcagaaggcttaccaccagctggatcagagcttcatcgatacttatatcgacctgctggagactcggagaacctactatgagggaccaggagaagggagccccttcggatggaaagacatcaaggaatggtacgagatgctgatgggacattgcacctattttccagaagagctgagaagcgtcaagtacgcttataacgcagatctgtacaacgccctgaatgacctgaacaacctggtcatcaccagggatgaaaacgagaaactggaatactatgagaagttccagatcatcgaaaacgtgtttaagcagaagaaaaagcctacactgaaacagattgctaaggagatcctggtcaacgaagaggacatcaagggctaccgggtgacaagcactggaaaaccagagttcaccaatctgaaagtgtatcacgatattaaggacatcacagcacggaaagaaatcattgagaacgccgaactgctggatcagattgctaagatcctgactatctaccagagctccgaggacatccaggaagagctgactaacctgaacagcgagctgacccaggaagagatcgaacagattagtaatctgaaggggtacaccggaacacacaacctgtccctgaaagctatcaatctgattctggatgagctgtggcatacaaacgacaatcagattgcaatctttaaccggctgaagctggtcccaaaaaaggtggacctgagtcagcagaaagagatcccaaccacactggtggacgatttcattctgtcacccgtggtcaagcggagcttcatccagagcatcaaagtgatcaacgccatcatcaagaagtacggcctgcccaatgatatcattatcgagctggctagggagaagaacagcaaggacgcacagaagatgatcaatgagatgcagaaacgaaaccggcagaccaatgaacgcattgaagagattatccgaactaccgggaaagagaacgcaaagtacctgattgaaaaaatcaagctgcacgatatgcaggagggaaagtgtctgtattctctggaggccatccccctggaggacctgctgaacaatccattcaactacgaggtcgatcatattatccccagaagcgtgtccttcgacaattcctttaacaacaaggtgctggtcaagcaggaagagaactctaaaaagggcaataggactcctttccagtacctgtctagttcagattccaagatctcttacgaaacctttaaaaagcacattctgaatctggccaaaggaaagggccgcatcagcaagaccaaaaaggagtacctgctggaagagcgggacatcaacagattctccgtccagaaggattttattaaccggaatctggtggacacaagatacgctactcgcggcctgatgaatctgctgcgatcctatttccgggtgaacaatctggatgtgaaagtcaagtccatcaacggcgggttcacatcttttctgaggcgcaaatggaagtttaaaaaggagcgcaacaaagggtacaagcaccatgccgaagatgctctgattatcgcaaatgccgacttcatctttaaggagtggaaaaagctggacaaagccaagaaagtgatggagaaccagatgttcgaagagaagcaggccgaatctatgcccgaaatcgagacagaacaggagtacaaggagattttcatcactcctcaccagatcaagcatatcaaggatttcaaggactacaagtactctcaccgggtggataaaaagcccaacagagagctgatcaatgacaccctgtatagtacaagaaaagacgataaggggaataccctgattgtgaacaatctgaacggactgtacgacaaagataatgacaagctgaaaaagctgatcaacaaaagtcccgagaagctgctgatgtaccaccatgatcctcagacatatcagaaactgaagctgattatggagcagtacggcgacgagaagaacccactgtataagtactatgaagagactgggaactacctgaccaagtatagcaaaaaggataatggccccgtgatcaagaagatcaagtactatgggaacaagctgaatgcccatctggacatcacagacgattaccctaacagtcgcaacaaggtggtcaagctgtcactgaagccatacagattcgatgtctatctggacaacggcgtgtataaatttgtgactgtcaagaatctggatgtcatcaaaaaggagaactactatgaagtgaatagcaagtgctacgaagaggctaaaaagctgaaaaagattagcaaccaggcagagttcatcgcctccttttacaacaacgacctgattaagatcaatggcgaactgtatagggtcatcggggtgaacaatgatctgctgaaccgcattgaagtgaatatgattgacatcacttaccgagagtatctggaaaacatgaatgataagcgcccccctcgaattatcaaaacaattgcctctaagactcagagtatcaaaaagtactcaaccgacattctgggaaacctgtatgaggtgaagagcaaaaagcaccctcagattatcaaaaagggc

SEQ ID NO: 40 - DNA, 20 bp, Artificial Sequence
  source: /note="Description of Artificial Sequence: Synthetic oligonucleotide"
gttagatgtcaccaattgta

SEQ ID NO: 41 - DNA, 43 bp, Artificial Sequence
  source: /note="Description of Artificial Sequence: Synthetic oligonucleotide"
acttttatgggttagatgtcaccaattgtaaggcctgtgactg

SEQ ID NO: 42 - RNA, 42 nt, Streptococcus pyogenes
  modified_base (1)..(20): a, c, u, g, unknown or other
nnnnnnnnnnnnnnnnnnnnguuuuagagcuaugcuguuuug

SEQ ID NO: 43 - RNA, 85 nt, Streptococcus pyogenes
ggaaccauucaaaacagcauagcaaguuaaaauaaggcuaguccguuaucaacuugaaaaaguggcaccgagucggugcuuuuuu

SEQ ID NO: 44 - RNA, 62 nt, Streptococcus pyogenes
  modified_base (1)..(20): a, c, u, g, unknown or other
nnnnnnnnnnnnnnnnnnnnguuuuagagcuagaaauagcaaguuaaaauaaggcuaguccg

SEQ ID NO: 45 - RNA, 102 nt, Streptococcus pyogenes
  modified_base (1)..(20): a, c, u, g, unknown or other
nnnnnnnnnnnnnnnnnnnnguuuuagagcuagaaauagcaaguuaaaauaaggcuaguccguuaucaacuugaaaaaguggcaccgagucggugcuuuuuu

SEQ ID NO: 46 - RNA, 75 nt, Streptococcus pyogenes
  modified_base (1)..(20): a, c, u, g, unknown or other
nnnnnnnnnnnnnnnnnnnnguuuuagagcuaugcugaaaagcauagcaaguuaaaauaaggcuaguccguuauc

SEQ ID NO: 47 - RNA, 87 nt, Streptococcus pyogenes
  modified_base (1)..(20): a, c, u, g, unknown or other
nnnnnnnnnnnnnnnnnnnnguuuuagagcuaugcuguuuuggaaacaaaacagcauagcaaguuaaaauaaggcuaguccguuauc

SEQ ID NO: 48 - RNA, 42 nt, Streptococcus thermophilus
  modified_base (1)..(20): a, c, u, g, unknown or other
nnnnnnnnnnnnnnnnnnnnguuuuagagcuguguuguuucg

SEQ ID NO: 49 - RNA, 78 nt, Streptococcus thermophilus
gggcgaaacaacacagcgaguuaaaauaaggcuuaguccguacucaacuugaaaagguggcaccgauucgguguuuuu

SEQ ID NO: 50 - RNA, 42 nt, Streptococcus pyogenes; identical to SEQ ID NO: 42
  modified_base (1)..(20): a, c, u, g, unknown or other

SEQ ID NO: 51 - RNA, 42 nt, Streptococcus thermophilus; identical to SEQ ID NO: 48
  modified_base (1)..(20): a, c, u, g, unknown or other

SEQ ID NO: 52 - RNA, 85 nt, Streptococcus pyogenes
gaaccauucaaaacagcauagcaaguuaaaauaaggcuaguccguuaucaacuugaaaaaguggcaccgagucggugcuuuuuuu

SEQ ID NO: 53 - RNA, 78 nt, Streptococcus thermophilus; identical to SEQ ID NO: 49

SEQ ID NO: 54 - protein, 12 aa, Artificial Sequence
  source: /note="Description of Artificial Sequence: Synthetic peptide"
DIGTNSVGWAVT

SEQ ID NO: 55 - protein, 12 aa, Artificial Sequence
  source: /note="Description of Artificial Sequence: Synthetic peptide"
DIGTNSVGWAVT

SEQ ID NO: 56 - protein, 12 aa, Artificial Sequence
  source: /note="Description of Artificial Sequence: Synthetic peptide"
DVGTNSVGWAVT

SEQ ID NO: 57 - protein, 12 aa, Artificial Sequence
  source: /note="Description of Artificial Sequence: Synthetic peptide"
DVGTNSVGWAVT

SEQ ID NO: 58 - protein, 12 aa, Artificial Sequence
  source: /note="Description of Artificial Sequence: Synthetic peptide"
DMGTNSVGWAVT

SEQ ID NO: 59 - protein, 12 aa, Artificial Sequence
  source: /note="Description of Artificial Sequence: Synthetic peptide"
DVGTSSVGWAVT

SEQ ID NO: 60 - protein, 12 aa, Artificial Sequence
  source: /note="Description of Artificial Sequence: Synthetic peptide"
DIGTASVGWAVT

SEQ ID NO: 61 - protein, 12 aa, Artificial Sequence
  source: /note="Description of Artificial Sequence: Synthetic peptide"
DVGTGSVGWAVT

SEQ ID NO: 62 - protein, 12 aa, Artificial Sequence
  source: /note="Description of Artificial Sequence: Synthetic peptide"
DIGTNSVGWAVV

SEQ ID NO: 63 - protein, 12 aa, Artificial Sequence
  source: /note="Description of Artificial Sequence: Synthetic peptide"
DIGTNSVGWAVI

SEQ ID NO: 64 - protein, 12 aa, Artificial Sequence
  source: /note="Description of Artificial Sequence: Synthetic peptide"
DIGTNSVGWAVL

SEQ ID NO: 65 - protein, 12 aa, Artificial Sequence
  source: /note="Description of Artificial Sequence: Synthetic peptide"
DLGTNSIGWAVV

SEQ ID NO: 66 - protein, 11 aa, Artificial Sequence
  source: /note="Description of Artificial Sequence: Synthetic peptide"
DLGTNSIGWAI

SEQ ID NO: 67 - protein, 12 aa, Artificial Sequence
  source: /note="Description of Artificial Sequence: Synthetic peptide"
DLGTNSIGWALV

SEQ ID NO: 68 - protein, 12 aa, Artificial Sequence
  source: /note="Description of Artificial Sequence: Synthetic peptide"
DIGTNSVGWCVT

SEQ ID NO: 69 - protein, 12 aa, Artificial Sequence
  source: /note="Description of Artificial Sequence: Synthetic peptide"
DIGTNSVGYAVT

SEQ ID NO: 70 - protein, 12 aa, Artificial Sequence
  source: /note="Description of Artificial Sequence: Synthetic peptide"
DMGTGSLGWAVT

SEQ ID NO: 71 - protein, 12 aa, Artificial Sequence
  source: /note="Description of Artificial Sequence: Synthetic peptide"
DIGTSSVGWAAI

SEQ ID NO: 72 - protein, 12 aa, Artificial Sequence
  source: /note="Description of Artificial Sequence: Synthetic peptide"
DLGTGSVGWAVV

SEQ ID NO: 73 - protein, 12 aa, Artificial Sequence
  source: /note="Description of Artificial Sequence: Synthetic peptide"
DLGVGSVGWAIV

SEQ ID NO: 74 - protein, 12 aa, Artificial Sequence
  source: /note="Description of Artificial Sequence: Synthetic peptide"
DLGIASIGWAII

SEQ ID NO: 75 - protein, 12 aa, Artificial Sequence
  source: /note="Description of Artificial Sequence: Synthetic peptide"
DLGIASVGWAIV

SEQ ID NO: 76 - protein, 12 aa, Artificial Sequence
  source: /note="Description of Artificial Sequence: Synthetic peptide"
DLGVASVGWSIV

SEQ ID NO: 77 - protein, 12 aa, Artificial Sequence
  source: /note="Description of Artificial Sequence: Synthetic peptide"
DIGIASVGWAIL

SEQ ID NO: 78 - protein, 12 aa, Artificial Sequence
  source: /note="Description of Artificial Sequence: Synthetic peptide"
DLGISSVGWSVI

SEQ ID NO: 79 - protein, 12 aa, Artificial Sequence
  source: /note="Description of Artificial Sequence: Synthetic peptide"
DIGIASVGWSVI

SEQ ID NO: 80 - protein, 12 aa, Artificial Sequence
  source: /note="Description of Artificial Sequence: Synthetic peptide"
DVGIGSIGWAVI

SEQ ID NO: 81 - protein, 12 aa, Artificial Sequence
  source: /note="Description of Artificial Sequence: Synthetic peptide"
DLGVGSIGFAIV

SEQ ID NO: 82 - protein, 12 aa, Artificial Sequence
  source: /note="Description of Artificial Sequence: Synthetic peptide"
DIGYASIGWAVI

SEQ ID NO: 83 - protein, 12 aa, Artificial Sequence
  source: /note="Description of Artificial Sequence: Synthetic peptide"
DTGTNSLGWAIV

SEQ ID NO: 84 - protein, 12 aa, Artificial Sequence
  source: /note="Description of Artificial Sequence: Synthetic peptide"
DLGTNSIGWCLL

SEQ ID NO: 85 - protein, 12 aa, Artificial Sequence
  source: /note="Description of Artificial Sequence: Synthetic peptide"
DIGTDSLGWAVF

SEQ ID NO: 86 - protein, 12 aa, Artificial Sequence
  source: /note="Description of Artificial Sequence: Synthetic peptide"
DIGSNSIGFAVV

SEQ ID NO: 87 - protein, 12 aa, Artificial Sequence
  source: /note="Description of Artificial Sequence: Synthetic peptide"
DLGVGSIGVAVA

SEQ ID NO: 88 - protein, 12 aa, Artificial Sequence
  source: /note="Description of Artificial Sequence: Synthetic peptide"
DLGIASCGWGVV

SEQ ID NO: 89 - protein, 12 aa, Artificial Sequence
  source: /note="Description of Artificial Sequence: Synthetic peptide"
DLGIASVGWCLT

SEQ ID NO: 90 - protein, 12 aa, Artificial Sequence
  source: /note="Description of Artificial Sequence: Synthetic peptide"
DIGIGSVGVGIL

SEQ ID NO: 91 - protein, 12 aa, Artificial Sequence
  source: /note="Description of Artificial Sequence: Synthetic peptide"
DIGITSVGYGLI

SEQ ID NO: 92 - protein, 12 aa, Artificial Sequence
  source: /note="Description of Artificial Sequence: Synthetic peptide"
DIGITSVGFGII

SEQ ID NO: 93 - protein, 12 aa, Artificial Sequence
  source: /note="Description of Artificial Sequence: Synthetic peptide"
DVGITSTGYAVL

SEQ ID NO: 94 - protein, 12 aa, Artificial Sequence
  source: /note="Description of Artificial Sequence: Synthetic peptide"
DLGITSFGYAIL

SEQ ID NO: 95 - protein, 12 aa, Artificial Sequence
  source: /note="Description of Artificial Sequence: Synthetic peptide"
DIGNASVGWSAF

SEQ ID NO: 96 - protein, 12 aa, Artificial Sequence
  source: /note="Description of Artificial Sequence: Synthetic peptide"
DVGTNSCGWVAM

SEQ ID NO: 97 - protein, 12 aa, Artificial Sequence
  source: /note="Description of Artificial Sequence: Synthetic peptide"
DVGERSIGLAAV

SEQ ID NO: 98 - protein, 12 aa, Artificial Sequence
  source: /note="Description of Artificial Sequence: Synthetic peptide"
DVGLNSVGLAAV

SEQ ID NO: 99 - protein, 12 aa, Artificial Sequence
  source: /note="Description of Artificial Sequence: Synthetic peptide"
DVGLMSVGLAAI

SEQ ID NO: 100 - protein, 12 aa, Artificial Sequence
  source: /note="Description of Artificial Sequence: Synthetic peptide"
DVGTFSVGLAAI

SEQ ID NO: 101 - protein, 12 aa, Artificial Sequence
  source: /note="Description of Artificial Sequence: Synthetic peptide"
DIGTGSVGYACM

SEQ ID NO: 102 - protein, 12 aa, Artificial Sequence
  source: /note="Description of Artificial Sequence: Synthetic peptide"
DLGTTSIGFAHI

SEQ ID NO: 103 - protein, 12 aa, Artificial Sequence
  source: /note="Description of Artificial Sequence: Synthetic peptide"
DLGTNSIGSSVR

SEQ ID NO: 104 - protein, 12 aa, Artificial Sequence
  source: /note="Description of Artificial Sequence: Synthetic peptide"
DIGTNSVGWAVT

SEQ ID NO: 105 - protein, 12 aa, Artificial Sequence
  source: /note="Description of Artificial Sequence: Synthetic peptide"
DIGTNSVGWAVT

SEQ ID NO: 106 - protein, 12 aa, Artificial Sequence
  source: /note="Description of Artificial Sequence: Synthetic peptide"
DVGTNSVGWAVT

SEQ ID NO: 107 - protein, 12 aa, Artificial Sequence
  source: /note="Description of Artificial Sequence: Synthetic peptide"
DVGTNSVGWAVT

SEQ ID NO: 108 - protein, 12 aa, Artificial Sequence
  source: /note="Description of Artificial Sequence: Synthetic peptide"
DMGTNSVGWAVT

SEQ ID NO: 109 - protein, 12 aa, Artificial Sequence
  source: /note="Description of Artificial Sequence: Synthetic peptide"
DVGTSSVGWAVT

SEQ ID NO: 110 - protein, 12 aa, Artificial Sequence
  source: /note="Description of Artificial Sequence: Synthetic peptide"
DIGTASVGWAVT

SEQ ID NO: 111 - protein, 12 aa, Artificial Sequence
  source: /note="Description of Artificial Sequence: Synthetic peptide"
DVGTGSVGWAVT

SEQ ID NO: 112 - protein, 12 aa, Artificial Sequence
  source: /note="Description of Artificial Sequence: Synthetic peptide"
DIGTNSVGWAVV

SEQ ID NO: 113 - protein, 12 aa, Artificial Sequence
  source: /note="Description of Artificial Sequence: Synthetic peptide"
DIGTNSVGWAVI

SEQ ID NO: 114 - protein, 12 aa, Artificial Sequence
  source: /note="Description of Artificial Sequence: Synthetic peptide"
DIGTNSIGWAVI

SEQ ID NO: 115 - protein, 12 aa, Artificial Sequence
  source: /note="Description of Artificial Sequence: Synthetic peptide"
DIGTNSVGWAVL

SEQ ID NO: 116 - protein, 12 aa, Artificial Sequence
  source: /note="Description of Artificial Sequence: Synthetic peptide"
DLGTNSIGWAVV

SEQ ID NO: 117 - protein, 11 aa, Artificial Sequence
  source: /note="Description of Artificial Sequence: Synthetic peptide"
DLGTNSIGWAI

SEQ ID NO: 118 - protein, 12 aa, Artificial Sequence
  source: /note="Description of Artificial Sequence: Synthetic peptide"
DLGTNSIGWALV

SEQ ID NO: 119 - protein, 12 aa, Artificial Sequence
  source: /note="Description of Artificial Sequence: Synthetic peptide"
DIGTNSVGWCVT

SEQ ID NO: 120 - protein, 12 aa, Artificial Sequence
  source: /note="Description of Artificial Sequence: Synthetic peptide"
DIGTNSVGYAVT

SEQ ID NO: 121 - protein, 12 aa, Artificial Sequence
  source: /note="Description of Artificial Sequence: Synthetic peptide"
DMGTGSLGWAVT

SEQ ID NO: 122 - protein, 12 aa, Artificial Sequence
  source: /note="Description of Artificial Sequence: Synthetic peptide"
DIGTSSVGWAAI

SEQ ID NO: 123 - protein, 12 aa, Artificial Sequence
  source: /note="Description of Artificial Sequence: Synthetic peptide"
DLGTGSVGWAVV

SEQ ID NO: 124 - protein, 12 aa, Artificial Sequence
  source: /note="Description of Artificial Sequence: Synthetic peptide"
DLGVGSVGWAIV

SEQ ID NO: 125 - protein, 12 aa, Artificial Sequence
  source: /note="Description of Artificial Sequence: Synthetic peptide"
DLGIASIGWAII

SEQ ID NO: 126 - protein, 12 aa, Artificial Sequence
  source: /note="Description of Artificial Sequence: Synthetic peptide"
DLGIASVGWAIV

SEQ ID NO: 127 - protein, 12 aa, Artificial Sequence
  source: /note="Description of Artificial Sequence: Synthetic peptide"
DLGIASVGWAVV

SEQ ID NO: 128 - protein, 12 aa, Artificial Sequence
  source: /note="Description of Artificial Sequence: Synthetic peptide"
DLGVASVGWSIV

SEQ ID NO: 129 - protein, 12 aa, Artificial Sequence
  source: /note="Description of Artificial Sequence: Synthetic peptide"
DIGIASVGWAIL

SEQ ID NO: 130 - protein, 12 aa, Artificial Sequence
  source: /note="Description of Artificial Sequence: Synthetic peptide"
DIGIASVGWAVL

SEQ ID NO: 131 - protein, 12 aa, Artificial Sequence
  source: /note="Description of Artificial Sequence: Synthetic peptide"
DIGIASIGWAVI

SEQ ID NO: 132 - protein, 12 aa, Artificial Sequence
  source: /note="Description of Artificial Sequence: Synthetic peptide"
DIGIASVGWAII

SEQ ID NO: 133 - protein, 12 aa, Artificial Sequence
  source: /note="Description of Artificial Sequence: Synthetic peptide"
DVGIASVGWAVI

SEQ ID NO: 134 - protein, 11 aa, Artificial Sequence
  source: /note="Description of Artificial Sequence: Synthetic peptide"
DIGIASVGWAL

SEQ ID NO: 135 - protein, 12 aa, Artificial Sequence
  source: /note="Description of Artificial Sequence: Synthetic peptide"
DIGIASVGWAMV

SEQ ID NO: 136 - protein, 12 aa, Artificial Sequence
  source: /note="Description of Artificial Sequence: Synthetic peptide"
DIGIASVGWSVI

SEQ ID NO: 137 - protein, 12 aa, Artificial Sequence
  source: /note="Description of Artificial Sequence: Synthetic peptide"
DLGISSVGWSVI

SEQ ID NO: 138 - protein, 12 aa, Artificial Sequence
  source: /note="Description of Artificial Sequence: Synthetic peptide"
DIGITSVGWAVI

SEQ ID NO: 139 - protein, 12 aa, Artificial Sequence
  source: /note="Description of Artificial Sequence: Synthetic peptide"
DVGIGSIGWAVI

SEQ ID NO: 140 - protein, 12 aa, Artificial Sequence
  source: /note="Description of Artificial Sequence: Synthetic peptide"
DLGISSLGWAIV

SEQ ID NO: 141 - protein, 12 aa, Artificial Sequence
  source: /note="Description of Artificial Sequence: Synthetic peptide"
DLGVGSIGFAIV

SEQ ID NO: 142 - protein, 12 aa, Artificial Sequence
  source: /note="Description of Artificial Sequence: Synthetic peptide"
DIGYASIGWAVI

SEQ ID NO: 143 - protein, 12 aa, Artificial Sequence
  source: /note="Description of Artificial Sequence: Synthetic peptide"
DLGTNSIGWCLL

SEQ ID NO: 144 - protein, 12 aa, Artificial Sequence
  source: /note="Description of Artificial Sequence: Synthetic peptide"
DLGTNSIGWGLL

SEQ ID NO: 145 - protein, 12 aa, Artificial Sequence
  source: /note="Description of Artificial Sequence: Synthetic peptide"
DTGTNSLGWAIV

SEQ ID NO: 146 - protein, 12 aa, Artificial Sequence
  source: /note="Description of Artificial Sequence: Synthetic peptide"
DIGTDSLGWAVF

SEQ ID NO: 147 - protein, 12 aa, Artificial Sequence
  source: /note="Description of Artificial Sequence: Synthetic peptide"
DLGSTSLGWAIF

SEQ ID NO: 148 - protein, 12 aa, Artificial Sequence
  source: /note="Description of Artificial Sequence: Synthetic peptide"
DIGISSIGWAFS

SEQ ID NO: 149 - protein, 12 aa, Artificial Sequence
  source: /note="Description of Artificial Sequence: Synthetic peptide"
DLGIASVGWCLT

SEQ ID NO: 150 - protein, 12 aa, Artificial Sequence
  source: /note="Description of Artificial Sequence: Synthetic peptide"
DLGIASCGWGVV

SEQ ID NO: 151 - protein, 12 aa, Artificial Sequence
  source: /note="Description of Artificial Sequence: Synthetic peptide"
DIGSNSIGFAVV

SEQ ID NO: 152 - protein, 12 aa, Artificial Sequence
  source: /note="Description of Artificial Sequence: Synthetic peptide"
DIGTTSIGFSVI

SEQ ID NO: 153 - protein, 12 aa, Artificial Sequence
  source: /note="Description of Artificial Sequence: Synthetic peptide"
DIGITSVGYGLI

SEQ ID NO: 154 - protein, 12 aa, Artificial Sequence
  source: /note="Description of Artificial Sequence: Synthetic peptide"
DIGITSVGFGII

SEQ ID NO: 155 - protein, 12 aa, Artificial Sequence
  source: /note="Description of Artificial Sequence: Synthetic peptide"
DLGTTSIGFAHI

SEQ ID NO: 156 - protein, 12 aa, Artificial Sequence
  source: /note="Description of Artificial Sequence: Synthetic peptide"
DIGIGSVGVGIL

SEQ ID NO: 157 - protein, 12 aa, Artificial Sequence
  source: /note="Description of Artificial Sequence: Synthetic peptide"
DLGVGSIGVAVA

SEQ ID NO: 158 - protein, 12 aa, Artificial Sequence
  source: /note="Description of Artificial Sequence: Synthetic peptide"
DVGITSTGYAVL

SEQ ID NO: 159 - protein, 12 aa, Artificial Sequence
  source: /note="Description of Artificial Sequence: Synthetic peptide"
DLGITSFGYAIL

SEQ ID NO: 160 - protein, 12 aa, Artificial Sequence
  source: /note="Description of Artificial Sequence: Synthetic peptide"
DIGTSSIGWWLY

SEQ ID NO: 161 - protein, 12 aa, Artificial Sequence
  source: /note="Description of Artificial Sequence: Synthetic peptide"
DLGSNSLGWFVT

SEQ ID NO: 162 - protein, 12 aa, Artificial Sequence
  source: /note="Description of Artificial Sequence: Synthetic peptide"
DLGANSLGWFVV

SEQ ID NO: 163 - protein, 12 aa, Artificial Sequence
  source: /note="Description of Artificial Sequence: Synthetic peptide"
DIGNASVGWSAF

SEQ ID NO: 164 - protein, 12 aa, Artificial Sequence
  source: /note="Description of Artificial Sequence: Synthetic peptide"
DVGTNSCGWVAM

SEQ ID NO: 165 - protein, 12 aa, Artificial Sequence
  source: /note="Description of Artificial Sequence: Synthetic peptide"
DVGERSIGLAAV

SEQ ID NO: 166 - protein, 12 aa, Artificial Sequence
  source: /note="Description of Artificial Sequence: Synthetic peptide"
DVGLNSVGLAAV

SEQ ID NO: 167 - protein, 12 aa, Artificial Sequence
  source: /note="Description of Artificial Sequence: Synthetic peptide"
DVGLMSVGLAAI

SEQ ID NO: 168 - protein, 12 aa, Artificial Sequence
  source: /note="Description of Artificial Sequence: Synthetic peptide"
DVGTFSVGLAAI

SEQ ID NO: 169 - protein, 12 aa, Artificial Sequence
  source: /note="Description of Artificial Sequence: Synthetic peptide"
DIGTGSVGYACM

SEQ ID NO: 170 - protein, 12 aa, Artificial Sequence
  source: /note="Description of Artificial Sequence: Synthetic peptide"
DLGTNSIGSSVR

SEQ ID NO: 171 - protein, 15 aa, Artificial Sequence
  source: /note="Description of Artificial Sequence: Synthetic peptide"
DIGLRIGITSCGWSI

SEQ ID NO: 172 - protein, 12 aa, Artificial Sequence
  source: /note="Description of Artificial Sequence: Synthetic peptide"
DMGAKYTGVFYA

SEQ ID NO: 173 - protein, 12 aa, Artificial Sequence
  source: /note="Description of Artificial Sequence: Synthetic peptide"
DLGGKNTGFFSF

SEQ ID NO: 174 - protein, 12 aa, Artificial Sequence
  source: /note="Description of Artificial Sequence: Synthetic peptide"
DLGVKNTGVFSA

SEQ ID NO: 175 - protein, 12 aa, Artificial Sequence
  source: /note="Description of Artificial Sequence: Synthetic peptide"
DLGAKFTGVALY

SEQ ID NO: 176 - protein, 12 aa, Artificial Sequence
  source: /note="Description of Artificial Sequence: Synthetic peptide"
DLGGKFTGVCLS

SEQ ID NO: 177 - protein, 12 aa, Artificial Sequence
  source: /note="Description of Artificial Sequence: Synthetic peptide"
DLGGTYTGTFIT

SEQ ID NO: 178 - protein, 28 aa, Artificial Sequence
  source: /note="Description of Artificial Sequence: Synthetic peptide"
YDIDHIYPRSLTKDDSFDNLVLCERTAN

SEQ ID NO: 179 - protein, 28 aa, Artificial Sequence
  source: /note="Description of Artificial Sequence: Synthetic peptide"
DIDHIYPRSKVIKDDSFDNLVLVLKNEN

SEQ ID NO: 180 - protein, 27 aa, Artificial Sequence
  source: /note="Description of Artificial Sequence: Synthetic peptide"
DRDHIYPQSKIKDDSIDNLVLVNKTYN

SEQ ID NO: 181 - protein, 27 aa, Artificial Sequence
  source: /note="Description of Artificial Sequence: Synthetic peptide"
DIDHIYPRSKIKDDSITNRVLVEKDIN

SEQ ID NO: 182 - protein, 27 aa, Artificial Sequence
  source: /note="Description of Artificial Sequence: Synthetic peptide"
DIDHIYPQSKIKDDSISNRVLVCSSCN

SEQ ID NO: 183 - protein, 27 aa, Artificial Sequence
  source: /note="Description of Artificial Sequence: Synthetic peptide"
DIDHIYPQSKTMDDSLNNRVLVKKNYN

SEQ ID NO: 184 - protein, 27 aa, Artificial Sequence
  source: /note="Description of Artificial Sequence: Synthetic peptide"
DQDHIYPKSKIYDDSLENRVLVKKNLN

SEQ ID NO: 185 - protein, 27 aa, Artificial Sequence
  source: /note="Description of Artificial Sequence: Synthetic peptide"
QIDHIVPQSLVKDDSFDNRVLVVPSEN

SEQ ID NO: 186 - protein, 27 aa, Artificial Sequence
  source: /note="Description of Artificial Sequence: Synthetic peptide"
DIDHIIPQAFIKDNSIDNRVLTSSKEN

SEQ ID NO: 187 - protein, 27 aa, Artificial Sequence
  source: /note="Description of Artificial Sequence: Synthetic peptide"
DIDHIIPQAFLKDNSIDNKVLVSSASN

SEQ ID NO: 188 - protein, 27 aa, Artificial Sequence
  source: /note="Description of Artificial Sequence: Synthetic peptide"
DIDHIIPQAYTKDNSLDNRVLVSNITN

SEQ ID NO: 189 - protein, 27 aa, Artificial Sequence
  source: /note="Description of Artificial Sequence: Synthetic peptide"
DIDHIVPQSFITDNSIDNLVLTSSAGN

SEQ ID NO: 190 - protein, 27 aa, Artificial Sequence
  source: /note="Description of Artificial Sequence: Synthetic peptide"
DVDHIVPQSFLKDDSIDNKVLTRSDKN

SEQ ID NO: 191 - protein, 27 aa, Artificial Sequence
  source: /note="Description of Artificial Sequence: Synthetic peptide"
NIDHIYPQSMVKDDSLDNKVLVQSEIN

SEQ ID NO: 192 - protein, 27 aa, Artificial Sequence
  source: /note="Description of Artificial Sequence: Synthetic peptide"
DIDHILPQSLIKDDSLDNRVLVNATIN

SEQ ID NO: 193 - protein, 27 aa, Artificial Sequence
  source: /note="Description of Artificial Sequence: Synthetic peptide"
DIDHILPQSFIKDDSLENRVLVKKAVN

SEQ ID NO: 194 - protein, 27 aa, Artificial Sequence
  source: /note="Description of Artificial Sequence: Synthetic peptide"
EVDHIFPRSFIKDDSIDNKVLVIKKMN

SEQ ID NO: 195 - protein, 27 aa, Artificial Sequence
  source: /note="Description of Artificial Sequence: Synthetic peptide"
EVDHIIPRSYIKDDSFENKVLVYREEN

SEQ ID NO: 196 - protein, 27 aa, Artificial Sequence
  source: /note="Description of Artificial Sequence: Synthetic peptide"
DIDHIIPQAVTQNDSIDNRVLVARAEN

SEQ ID NO: 197 - protein, 27 aa, Artificial Sequence
  source: /note="Description of Artificial Sequence: Synthetic peptide"
EIDHIIPYSISFDDSSSNKLLVLAESN

SEQ ID NO: 198 - protein, 27 aa, Artificial Sequence
  source: /note="Description of Artificial Sequence: Synthetic peptide"
EIDHIIPYSLCFDDSSANKVLVHKQSN

SEQ ID NO: 199 - protein, 27 aa, Artificial Sequence
  source: /note="Description of Artificial Sequence: Synthetic peptide"
DIDHIIPYSRSMDDSYSNKVLVLSGEN

SEQ ID NO: 200 - protein, 27 aa, Artificial Sequence
  source: /note="Description of Artificial Sequence: Synthetic peptide"
DIDHIIPYSKSMDDSFNNKVLCLAEEN

SEQ ID NO: 201 - protein, 27 aa, Artificial Sequence
  source: /note="Description of Artificial Sequence: Synthetic peptide"
EIDHIYPYSRSFDDSYMNKVLVFTKQN

SEQ ID NO: 202 - protein, 27 aa, Artificial Sequence
  source: /note="Description of Artificial Sequence: Synthetic peptide"
QIDHIYPYSRSMDDSYMNKVLVLTDEN

SEQ ID NO: 203 - protein, 27 aa, Artificial Sequence
  source: /note="Description of Artificial Sequence: Synthetic peptide"
EIDHIIPFSRSFDDSLSNKILVLGSEN

SEQ ID NO: 204 - protein, 27 aa, Artificial Sequence
  source: /note="Description of Artificial Sequence: Synthetic peptide"
EIDHALPFSRTWDDSFNNKVLVLGSEN

SEQ ID NO: 205 - protein, 27 aa, Artificial Sequence
  source: /note="Description of Artificial Sequence: Synthetic peptide"
EIDHALPFSRTWDDSFNNKVLVLASEN

SEQ ID NO: 206 - protein, 27 aa, Artificial Sequence
  source: /note="Description of Artificial Sequence: Synthetic peptide"
EIDHIIPISISLDDSINNKVLVLSKAN

SEQ ID NO: 207 - protein, 27 aa, Artificial Sequence
  source: /note="Description of Artificial Sequence: Synthetic peptide"
EVDHIIPISISLDDSITNKVLVTHREN

SEQ ID NO: 208 - protein, 27 aa, Artificial Sequence
  source: /note="Description of Artificial Sequence: Synthetic peptide"
QVDHALPYSRSYDDSKNNKVLVLTHEN

SEQ ID NO: 209 - protein, 27 aa, Artificial Sequence
  source: /note="Description of Artificial Sequence: Synthetic peptide"
EVDHILPLSITFDDSLANKVLVYATAN

SEQ ID NO: 210 - protein, 27 aa, Artificial Sequence
  source: /note="Description of Artificial Sequence: Synthetic peptide"
EIDHIIPRSISFDDARSNKVLVYRSEN

SEQ ID NO: 211 - protein, 27 aa, Artificial Sequence
  source: /note="Description of Artificial Sequence: Synthetic peptide"
EVDHIIPRSVSFDNSYHNKVLVKQSEN

SEQ ID NO: 212 - protein, 27 aa, Artificial Sequence
  source: /note="Description of Artificial Sequence: Synthetic peptide"
DIDHILPYSITFDDSFRNKVLVTSQEN

SEQ ID NO: 213 - protein, 27 aa, Artificial Sequence
  source: /note="Description of Artificial Sequence: Synthetic peptide"
EIDHILPRSRSADDSFANKVLCLARAN

SEQ ID NO: 214 - protein, 27 aa, Artificial Sequence
  source: /note="Description of Artificial Sequence: Synthetic peptide"
EIEHLLPFSLTLDDSMANKTVCFRQAN

SEQ ID NO: 215 - protein, 27 aa, Artificial Sequence
  source: /note="Description of Artificial Sequence: Synthetic peptide"
DIDHILPFSVSLDDSAANKVVCLREAN

SEQ ID NO: 216 - protein, 27 aa, Artificial Sequence
  source: /note="Description of Artificial Sequence: Synthetic peptide"
DIDHLIPFSISWDDSAANKVVCMRYAN

SEQ ID NO: 217 - protein, 27 aa, Artificial Sequence
  source: /note="Description of Artificial Sequence: Synthetic peptide"
DIDHILPVAMTLDDSPANKIICMRYAN

SEQ ID NO: 218 - protein, 27 aa, Artificial Sequence
  source: /note="Description of Artificial Sequence: Synthetic peptide"
DVDHILPYSRTLDDSFPNRTLCLREAN

SEQ ID NO: 219 - protein, 27 aa, Artificial Sequence
  source: /note="Description of Artificial Sequence: Synthetic peptide"
EIEHILPFSRTLDDSLNNRTVAMRRAN

SEQ ID NO: 220 - protein, 27 aa, Artificial Sequence
  source: /note="Description of Artificial Sequence: Synthetic peptide"
EVDHIIPYSISWDDSYTNKVLTSAKCN

SEQ ID NO: 221 - protein, 27 aa, Artificial Sequence
  source: /note="Description of Artificial Sequence: Synthetic peptide"
QVDHILPWSRFGDDSYLNKTLCTARSN

SEQ ID NO: 222 - protein, 27 aa, Artificial Sequence
  source: /note="Description of Artificial Sequence: Synthetic peptide"
QVDHILPFSKTLDDSFANKVLAQHDAN

SEQ ID NO: 223 - protein, 27 aa, Artificial Sequence
  source: /note="Description of Artificial Sequence: Synthetic peptide"
QIDHAFPLSRSLDDSQSNKVLCLTSSN

SEQ ID NO: 224 - protein, 27 aa, Artificial Sequence
  source: /note="Description of Artificial Sequence: Synthetic peptide"
DIDHIVPRSISFDDSFSNLVIVNKLDN

SEQ ID NO: 225 - protein, 27 aa, Artificial Sequence
  source: /note="Description of Artificial Sequence: Synthetic peptide"
EIEHIIPYSMSYDNSQANKILTEKAEN

SEQ ID NO: 226 - protein, 27 aa, Artificial Sequence
  source: /note="Description of Artificial Sequence: Synthetic peptide"
EIDHVIPYSKSADDSWFNKLLVKKSTN

SEQ ID NO: 227 - protein, 27 aa, Artificial Sequence
  source: /note="Description of Artificial Sequence: Synthetic peptide"
EMDHILPYSRSLDNGWHNRVLVHGKDN

SEQ ID NO: 228 - protein, 27 aa, Artificial Sequence
  source: /note="Description of Artificial Sequence: Synthetic peptide"
EVDHIVPYSLILDNTINNKALVYAEEN

SEQ ID NO: 229 - protein, 27 aa, Artificial Sequence
  source: /note="Description of Artificial Sequence: Synthetic peptide"
EIEHVIPQSLYFDDSFSNKVICEAEVN

SEQ ID NO: 230 - protein, 27 aa, Artificial Sequence
  source: /note="Description of Artificial Sequence: Synthetic peptide"
DIEHIIPQARLFDDSFSNKTLEARSVN

SEQ ID NO: 231 - protein, 27 aa, Artificial Sequence
  source: /note="Description of Artificial Sequence: Synthetic peptide"
EIEHIVPKARVFDDSFSNKTLTFHRIN

SEQ ID NO: 232 - protein, 28 aa, Artificial Sequence
  source: /note="Description of Artificial Sequence: Synthetic peptide"
DKDHIIPQSMKKDDSIINNLVLVNKNAN

SEQ ID NO: 233 - protein, 27 aa, Artificial Sequence
  source: /note="Description of Artificial Sequence: Synthetic peptide"
EVEHIWPRSRSFDNSPRNKTLCRKDVN

SEQ ID NO: 234 - protein, 27 aa, Artificial Sequence
  source: /note="Description of Artificial Sequence: Synthetic peptide"
IVNHIIPYNRSFDDTYHNRVLTLTETK

SEQ ID NO: 235 - protein, 27 aa, Artificial Sequence
  source: /note="Description of Artificial Sequence: Synthetic peptide"
DMEHTIPKSISFDNSDQNLTLCESYYN

SEQ ID NO: 236 - protein, 27 aa, Artificial Sequence
  source: /note="Description of Artificial Sequence: Synthetic peptide"
DIEHTIPRSAGGDSTKMNLTLCSSRFN

SEQ ID NO: 237 - protein, 27 aa, Artificial Sequence
  source: /note="Description of Artificial Sequence: Synthetic peptide"
DIEHTIPRSISQDNSQMNKTLCSLKFN

SEQ ID NO: 238 - protein, 27 aa, Artificial Sequence
  source: /note="Description of Artificial Sequence: Synthetic peptide"
DIDHVIPLARGGRDSLDNMVLCQSDAN

SEQ ID NO: 239 - protein, 27 aa, Artificial Sequence
  source: /note="Description of Artificial Sequence: Synthetic peptide"
DIEHLFPIAESEDNGRNNLVISHSACN

SEQ ID NO: 240 - protein, 27 aa, Artificial Sequence
  source: /note="Description of Artificial Sequence: Synthetic peptide"
DVDHIFPRDDTADNSYGNKVVAHRQCN

SEQ ID NO: 241 - protein, 27 aa, Artificial Sequence
  source: /note="Description of Artificial Sequence: Synthetic peptide"
DIEHIVPQSLGGLSTDYNTIVTLKSVN

SEQ ID NO: 242 - protein, 27 aa, Artificial Sequence
  source: /note="Description of Artificial Sequence: Synthetic peptide"
ELDHIVPRTDGGSNRHENLAITCGACN

SEQ ID NO: 243 - protein, 28 aa, Artificial Sequence
  source: /note="Description of Artificial Sequence: Synthetic peptide"
EMDHIVPRKGVGSTNTRTNFAAVCAECN

SEQ ID NO: 244 - protein, 28 aa, Artificial Sequence
  source: /note="Description of Artificial Sequence: Synthetic peptide"
EMDHIVPRKGVGSTNTRVNLAAACAACN

SEQ ID NO: 245 - protein, 28 aa, Artificial Sequence
  source: /note="Description of Artificial Sequence: Synthetic peptide"
EMDHIVPRAGQGSTNTRENLVAVCHRCN

SEQ ID NO: 246 - protein, 33 aa, Artificial Sequence
  source: /note="Description of Artificial Sequence: Synthetic polypeptide"
EIDHILPRSLIKDARGIVFNAEPNLIYASSRGN

SEQ ID NO: 247 - protein, 33 aa, Artificial Sequence
  source: /note="Description of Artificial Sequence: Synthetic polypeptide"
EIDHIIPRSLTGRTKKTVFNSEANLIYCSSKGN

SEQ ID NO: 248 - protein, 33 aa, Artificial Sequence
  source: /note="Description of Artificial Sequence: Synthetic polypeptide"
EIDHIIPRSLTLKKSESIYNSEVNLIFVSAQGN

SEQ ID NO: 249 - protein, 33 aa, Artificial Sequence
  source: /note="Description of Artificial Sequence: Synthetic polypeptide"
EIDHIYPRSLSKKHFGVIFNSEVNLIYCSSQGN

SEQ ID NO: 250 - protein, 33 aa, Artificial Sequence
  source: /note="Description of Artificial Sequence: Synthetic polypeptide"
EIDHILPRSHTLKIYGTVFNPEGNLIYVHQKCN

SEQ ID NO: 251 - protein, 30 aa, Artificial Sequence
  source: /note="Description of Artificial Sequence: Synthetic polypeptide"
ELDHIIPRSHKKYGTLNDEANLICVTRGDN

SEQ ID NO: 252 - protein, 27 aa, Artificial Sequence
  source: /note="Description of Artificial Sequence: Synthetic peptide"
ELEHIVPHSFRQSNALSSLVLTWPGVN

SEQ ID NO: 253 - protein, 28 aa, Artificial Sequence
  source: /note="Description of Artificial Sequence: Synthetic peptide"
YDIDHIYPRSLTKDDSFDNLVLCERTAN

SEQ ID NO: 254 - protein, 28 aa, Artificial Sequence
  source: /note="Description of Artificial Sequence: Synthetic peptide"
DIDHIYPRSKVIKDDSFDNLVLVLKNEN

SEQ ID NO: 255 - protein, 27 aa, Artificial Sequence
  source: /note="Description of Artificial Sequence: Synthetic peptide"
DRDHIYPQSKIKDDSIDNLVLVNKTYN

SEQ ID NO: 256 - protein, 27 aa, Artificial Sequence
  source: /note="Description of Artificial Sequence: Synthetic peptide"
DIDHIYPRSKIKDDSITNRVLVEKDIN

SEQ ID NO: 257 - protein, 27 aa, Artificial Sequence
  source: /note="Description of Artificial Sequence: Synthetic peptide"
DIDHIYPQSKIKDDSISNRVLVCSSCN

SEQ ID NO: 258 - protein, 27 aa, Artificial Sequence
  source: /note="Description of Artificial Sequence: Synthetic peptide"
DIDHIYPQSKTMDDSLNNRVLVKKNYN

SEQ ID NO: 259 - protein, 27 aa, Artificial Sequence
  source: /note="Description of Artificial Sequence: Synthetic peptide"
DQDHIYPKSKIYDDSLENRVLVKKNLN

SEQ ID NO: 260 - protein, 27 aa, Artificial Sequence
  source: /note="Description of Artificial Sequence: Synthetic peptide"
QIDHIVPQSLVKDDSFDNRVLVVPSEN

SEQ ID NO: 261 - protein, 27 aa, Artificial Sequence
  source: /note="Description of Artificial Sequence: Synthetic peptide"
DIDHIIPQAFIKDNSIDNRVLTSSKEN

SEQ ID NO: 262 - protein, 27 aa, Artificial Sequence
  source: /note="Description of Artificial Sequence: Synthetic peptide"
DIDHIIPQAFLKDNSIDNKVLVSSASN

SEQ ID NO: 263 - protein, 27 aa, Artificial Sequence
  source: /note="Description of Artificial Sequence: Synthetic peptide"
DIDHIIPQAYTKDNSLDNRVLVSNITN

SEQ ID NO: 264 - protein, 27 aa, Artificial Sequence
  source: /note="Description of Artificial Sequence: Synthetic peptide"
DIDHIVPQSFITDNSIDNLVLTSSAGN

SEQ ID NO: 265 - protein, 27 aa, Artificial Sequence
  source: /note="Description of Artificial Sequence: Synthetic peptide"
DVDHIVPQSFLKDDSIDNKVLTRSDKN

SEQ ID NO: 266 - protein, 27 aa, Artificial Sequence
  source: /note="Description of Artificial Sequence: Synthetic peptide"
NIDHIYPQSMVKDDSLDNKVLVQSEIN

SEQ ID NO: 267 - protein, 27 aa, Artificial Sequence
  source: /note="Description of Artificial Sequence: Synthetic peptide"
DIDHILPQSLIKDDSLDNRVLVNATIN

SEQ ID NO: 268 - protein, 27 aa, Artificial Sequence
  source: /note="Description of Artificial Sequence: Synthetic peptide"
DIDHILPQSFIKDDSLENRVLVKKAVN

SEQ ID NO: 269 - protein, 27 aa, Artificial Sequence
  source: /note="Description of Artificial Sequence: Synthetic peptide"
EVDHIFPRSFIKDDSIDNKVLVIKKMN

SEQ ID NO: 270 - protein, 27 aa, Artificial Sequence
  source: /note="Description of Artificial Sequence: Synthetic peptide"
EVDHIIPRSYIKDDSFENKVLVYREEN

SEQ ID NO: 271 - protein, 27 aa, Artificial Sequence
  source: /note="Description of Artificial Sequence: Synthetic peptide"
DIDHIIPQAVTQNDSIDNRVLVARAEN

SEQ ID NO: 272 - protein, 27 aa, Artificial Sequence
  source: /note="Description of Artificial Sequence: Synthetic peptide"
DIDHIVPRSISFDDSFSNLVIVNKLDN

SEQ ID NO: 273 - protein, 27 aa, Artificial Sequence
  source: /note="Description of Artificial Sequence: Synthetic peptide"
EIDHIIPYSISFDDSSSNKLLVLAESN

SEQ ID NO: 274 - protein, 27 aa, Artificial Sequence
  source: /note="Description of Artificial Sequence: Synthetic peptide"
EIDHIIPYSLCFDDSSANKVLVHKQSN

SEQ ID NO: 275 - protein, 27 aa, Artificial Sequence
  source: /note="Description of Artificial Sequence: Synthetic peptide"
EIDHIIPISISLDDSINNKVLVLSKAN

SEQ ID NO: 276 - protein, 27 aa, Artificial Sequence
  source: /note="Description of Artificial Sequence: Synthetic peptide"
EVDHIIPISISLDDSITNKVLVTHREN

SEQ ID NO: 277 - protein, 27 aa, Artificial Sequence
  source: /note="Description of Artificial Sequence: Synthetic peptide"
EVDHILPLSITFDDSLANKVLVYATAN

SEQ ID NO: 278 - protein, 27 aa, Artificial Sequence
  source: /note="Description of Artificial Sequence: Synthetic peptide"
EIDHIIPRSISFDDARSNKVLVYRSEN

SEQ ID NO: 279 - protein, 27 aa, Artificial Sequence
  source: /note="Description of Artificial Sequence: Synthetic peptide"
EVDHIIPRSVSFDNSYHNKVLVKQSEN

SEQ ID NO: 280 - protein, 27 aa, Artificial Sequence
  source: /note="Description of Artificial Sequence: Synthetic peptide"
EVDHIIPYSISWDDSYTNKVLTSAKCN

SEQ ID NO: 281 - protein, 27 aa, Artificial Sequence
  source: /note="Description of Artificial Sequence: Synthetic peptide"
DIDHIIPYSRSMDDSYSNKVLVLSGEN

SEQ ID NO: 282 - protein, 27 aa, Artificial Sequence
  source: /note="Description of Artificial Sequence: Synthetic peptide"
EIEHIIPYSMSYDNSQANKILTEKAEN

SEQ ID NO: 283 - protein, 27 aa, Artificial Sequence
  source: /note="Description of Artificial Sequence: Synthetic peptide"
EVDHIVPYSLILDNTINNKALVYAEEN

SEQ ID NO: 284 - protein, 27 aa, Artificial Sequence
  source: /note="Description of Artificial Sequence: Synthetic peptide"
EIDHVIPYSKSADDSWFNKLLVKKSTN

SEQ ID NO: 285 - protein, 27 aa, Artificial Sequence
  source: /note="Description of Artificial Sequence: Synthetic peptide"
EMDHILPYSRSLDNGWHNRVLVHGKDN

SEQ ID NO: 286 - protein, 27 aa, Artificial Sequence
  source: /note="Description of Artificial Sequence: Synthetic peptide"
EIEHVIPQSLYFDDSFSNKVICEAEVN

SEQ ID NO: 287 - protein, 27 aa, Artificial Sequence
  source: /note="Description of Artificial Sequence: Synthetic peptide"
DIEHIIPQARLFDDSFSNKTLEARSVN

SEQ ID NO: 288 - protein, 27 aa, Artificial Sequence
  source: /note="Description of Artificial Sequence: Synthetic peptide"
EIEHIVPKARVFDDSFSNKTLTFHRIN

SEQ ID NO: 289 - protein, 28 aa, Artificial Sequence
  source: /note="Description of Artificial Sequence: Synthetic peptide"
DKDHIIPQSMKKDDSIINNLVLVNKNAN

SEQ ID NO: 290 - protein, 27 aa, Artificial Sequence
  source: /note="Description of Artificial Sequence: Synthetic peptide"
QVDHILPWSRFGDDSYLNKTLCTARSN

SEQ ID NO: 291 - protein, 27 aa, Artificial Sequence
  source: /note="Description of Artificial Sequence: Synthetic peptide"
DIDHVIPLARGGRDSLDNMVLCQSDAN

SEQ ID NO: 292 - protein, 27 aa, Artificial Sequence
  source: /note="Description of Artificial Sequence: Synthetic peptide"
DMEHTIPKSISFDNSDQNLTLCESYYN

SEQ ID NO: 293 - protein, 27 aa, Artificial Sequence
  source: /note="Description of Artificial Sequence: Synthetic peptide"
DIEHTIPRSAGGDSTKMNLTLCSSRFN

SEQ ID NO: 294 - protein, 27 aa, Artificial Sequence
  source: /note="Description of Artificial Sequence: Synthetic peptide"
DIEHTIPRSISQDNSQMNKTLCSLKFN

SEQ ID NO: 295 - protein, 27 aa, Artificial Sequence
  source: /note="Description of Artificial Sequence: Synthetic peptide"
DIEHLFPIAESEDNGRNNLVISHSACN

SEQ ID NO: 296 - protein, 27 aa, Artificial Sequence
  source: /note="Description of Artificial Sequence: Synthetic peptide"
DVDHIFPRDDTADNSYGNKVVAHRQCN

SEQ ID NO: 297 - protein, 27 aa, Artificial Sequence
  source: /note="Description of Artificial Sequence: Synthetic peptide"
DIEHIVPQSLGGLSTDYNTIVTLKSVN

SEQ ID NO: 298 - protein, 27 aa, Artificial Sequence
  source: /note="Description of Artificial Sequence: Synthetic peptide"
ELDHIVPRTDGGSNRHENLAITCGACN

SEQ ID NO: 299 - protein, 28 aa, Artificial Sequence
  source: /note="Description of Artificial Sequence: Synthetic peptide"
EMDHIVPRKGVGSTNTRTNFAAVCAECN

SEQ ID NO: 300 - protein, 28 aa, Artificial Sequence
  source: /note="Description of Artificial Sequence: Synthetic peptide"
EMDHIVPRKGVGSTNTRVNLAAACAACN

SEQ ID NO: 301 - protein, 28 aa, Artificial Sequence
  source: /note="Description of Artificial Sequence: Synthetic peptide"
EMDHIVPRAGQGSTNTRENLVAVCHRCN

SEQ ID NO: 302 - protein, 27 aa, Artificial Sequence
  source: /note="Description of Artificial Sequence: Synthetic peptide"
ELEHIVPHSFRQSNALSSLVLTWPGVN

SEQ ID NO: 303 - DNA, 3333 bp, Artificial Sequence
  source: /note="Description of Artificial Sequence: Synthetic polynucleotide"
atggtgcctaagaagaagagaaaggtggctgccttcaaacctaattcaatcaactacatcctcggcctcgatatcggcatcgcatccgtcggctgggcgatggtagaaattgacgaagaagaaaaccccatccgcctgattgatttgggcgtgcgcgtatttgagcgtgccgaagtaccgaaaacaggcgactcccttgccatggcaaggcgtttggcgcgcagtgttcgccgcctgacccgccgtcgcgcccaccgcctgcttcggacccgccgcctattgaaacgcgaaggcgtattacaagccgccaattttgacgaaaacggcttgattaaatccttaccgaatacaccatggcaacttcgcgcagccgcattagaccgcaaactgacgcctttagagtggtcggcagtcttgttgcatttaatcaaacatcgcggctatttatcgcaacggaaaaacgagggcgaaactgccgataaggagcttggcgctttgcttaaaggcgtagccggcaatgcccatgccttacagacaggcgatttccgcacaccggccgaattggctttaaataaatttgagaaagaaagcggccatatccgcaatcagcgcagcgattattcgcatacgttcagccgcaaagatttacaggcggagctgattttgctgtttgaaaaacaaaaagaatttggcaatccgcatgtttcaggcggccttaaagaaggtattgaaaccctactgatgacgcaacgccctgccctgtccggcgatgccgttcaaaaaatgttggggcattgcaccttcgaaccggcagagccgaaagccgctaaaaacacctacacagccgaacgtttcatctggctgaccaagctgaacaacctgcgtattttagagcaaggcagcgagcggccattgaccgataccgaacgcgccacgcttatggacgagccatacagaaaatccaaactgacttacgcacaagcccgtaagctgctgggtttagaagataccgcctttttcaaaggcttgcgctatggtaaagacaatgccgaagcctcaacattgatggaaatgaaggcctaccatgccatcagccgtgcactggaaaaagaaggattgaaagacaaaaaatccccattaaacctttctcccgaattacaagacgaaatcggcacggcattctccctgttcaaaaccgatgaagacattacaggccgtctgaaagaccgtatacagcccgaaatcttagaagcgctgttgaaacacatcagcttcgataagttcgtccaaatttccttgaaagcattgcgccgaattgtgcctctaatggaacaaggcaaacgttacgatgaagcctgcgccgaaatctacggagaccattacggcaagaagaatacggaagaaaagatttatctgccgccgattcccgccgacgaaatccgcaaccccgtcgtcttgcgcgccttatctcaagcacgtaaggtcattaacggcgtggtacgccgttacggctccccagctcgtatccatattgaaactgcaagggaagtaggtaaatcgtttaaagaccgcaaagaaattgagaaacgccaagaagaaaaccgcaaagaccgggaaaaagccgccgccaaattccgagagtatttccccaattttgtcggagaacccaaatccaaagatattctgaaactgcgcctgtacgagcaacaacacggcaaatgcctgtattcgggcaaagaaatcaacttaggccgtctgaacgaaaaaggctatgtcgaaatcgaccatgccctgccgttctcgcgcacatgggacgacagtttcaacaataaagtactggtattgggcagcgaaaaccaaaacaaaggcaatcaaaccccttacgaatacttcaacggcaaagacaacagccgcgaatggcaggaatttaaagcgcgtgtcgaaaccagccgtttcccgcgcagtaaaaaacaacggattctgctgcaaaaattcgatgaagacggctttaaagaacgcaatctgaacgacacgcgctacgtcaaccgtttcctgtgtcaatttgttgccgaccgtatgcggctgacaggtaaaggcaagaaacgtgtctttgcatccaacggacaaattaccaatctgttgcgcggcttttggggattgcgcaaagtgcgtgcggaaaacgaccgccatcacgccttggacgccgtcgtcgttgcctgctcgaccgttgccatgcagcagaaaattacccgttttgtacgctataaagagatgaacgcgtttgacggtaaaaccatagacaaagaaacaggagaagtgctgcatcaaaaaacacacttcccacaaccttgggaatttttcgcacaagaagtcatgattcgcgtcttcggcaaaccggacggcaaacccgaattcgaagaagccgataccctagaaaaactgcgcacgttgcttgccgaaaaattatcatctcgccccgaagccgtacacgaatacgttacgccactgtttgtttcacgcgcgcccaatcggaagatgagcgggcaagggcatatggagaccgtcaaatccgccaaacgactggacgaaggcgtcagcgtgttgcgcgtaccgctgacacagttaaaactgaaagacttggaaaaaatggtcaatcgggagcgcgaacctaagctatacgaagcactgaaagcacggctggaagcacataaagacgatcctgccaaagcctttgccgagccgttttacaaatacgataaagcaggcaaccgcacccaacaggtaaaagccgtacgcgtagagcaagtacagaaaaccggcgtatgggtgcgcaaccataacggtattgccgacaacgcaaccatggtgcgcgtagatgtgtttgagaaaggcgacaagtattatctggtaccgatttacagttggcaggtagcgaaagggattttgccggatagggctgttgtacaaggaaaagatgaagaagattggcaacttattgatgatagtttcaactttaaattctcattacaccctaatgatttagtcgaggttataacaaaaaaagctagaatgtttggttactttgccagctgccatcgaggcacaggtaatatcaatatacgcattcatgatcttgatcataaaattggcaaaaatggaatactggaaggtatcggcgtcaaaaccgccctttcattccaaaaataccaaattgacgaactgggcaaagaaatcagaccatgccgtctgaaaaaacgcccgcctgtccgttacccatacgatgttccagattacgctgcagctccagcagcgaagaaaaagaagctggattaa

SEQ ID NO: 304 - protein, 1053 aa, Staphylococcus aureus; identical to SEQ ID NO: 26

SEQ ID NO: 305 - protein, 1368 aa, Streptococcus pyogenes [sequence omitted]

SEQ ID NO: 306 - protein, 984 aa, Campylobacter jejuni
MARILAFDIGISSIGWAFSENDELKDCGVRIFTKVENPKTGESLALPRRLARSARKRLARRKARLNHLKHLIANEFKLNYEDYQSFDESLAKAYKGSLISPYELRFRALNELLSKQDFARVILHIAKRRGYDDIKNSDDKEKGAILKAIKQNEEKLANYQSVGEYLYKEYFQKFKENSKEFTNVRNKKESYERCIAQSFLKDELKLIFKKQREFGFSFSKKFEEEVLSVAFYKRALKDFSHLVGNCSFFTDEKRAPKNSPLAFMFVALTRIINLLNNLKNTEGILYTKDDLNALLNEVLKNGTLTYKQTKKLLGLSDDYEFKGEKGTYFIEFKKYKEFIKALGEHNLSQDDLNEIAKDITLIKDEIKLKKALAKYDLNQNQIDSLSKLEFKDHLNISFKALKLVTPLMLEGKKYDEACNELNLKVAINEDKKDFLPAFNETYYKDEVTNPVVLRAIKEYRKVLNALLKKYGKVHKINIELAREVGKNHSQRAKIEKEQNENYKAKKDAELECEKLGLKINSKNILKLRLFKEQKEFCAYSGEKIKISDLQDEKMLEIDHIYPYSRSFDDSYMNKVLVFTKQNQEKLNQTPFEAFGNDSAKWQKIEVLAKNLPTKKQKRILDKNYKDKEQKNFKDRNLNDTRYIARLVLNYTKDYLDFLPLSDDENTKLNDTQKGSKVHVEAKSGMLTSALRHTWGFSAKDRNNHLHHAIDAVIIAYANNSIVKAFSDFKKEQESNSAELYAKKISELDYKNKRKFFEPFSGFRQKVLDKIDEIFVSKPERKKPSGALHEETFRKEEEFYQSYGGKEGVLKALELGKIRKVNGKIVKNGDMFRVDIFKHKKTNKFYAVPIYTMDFALKVLPNKAVARSKKGEIKDWILMDENYEFCFSLYKDSLILIQTKDMQEPEFVYYNAFTSSTVSLIVSKHDNKFETLSKNQKILFKNANEKEVIAKSIGIQNLKVFEKYIVSALGEVTKAEFRQREDFKK

SEQ ID NO: 307 - protein, 1436 aa, Bacteroides fragilis
MKRILGLDLGTNSIGWALVNEAENKDERSSIVKLGVRVNPLTVDELTNFEKGKSITTNADRTLKRGMRRNLQRYKLRRETLTEVLKEHKLITEDTILSENGNRTTFETYRLRAKAVTEEISLEEFARVLLMINKKRGYKSSRKAKGVEEGTLIDGMDIARELYNNNLTPGELCLQLLDAGKKFLPDFYRSDLQNELDRIWEKQKEYYPEILTDVLKEELRGKKRDAVWAICAKYFVWKENYTEWNKEKGKTEQQEREHKLEGIYSKRKRDEAKRENLQWRVNGLKEKLSLEQLVIVFQEMNTQINNSSGYLGAISDRSKELYFNKQTVGQYQMEMLDKNPNASLRNMVFYRQDYLDEFNMLWEKQAVYHKELTEELKKEIRDIIIFYQRRLKSQKGLIGFCEFESRQIEVDIDGKKKIKTVGNRVISRSSPLFQEFKIWQILNNIEVTVVGKKRKRRKLKENYSALFEELNDAEQLELNGSRRLCQEEKELLAQELFIRDKMTKSEVLKLLFDNPQELDLNFKTIDGNKTGYALFQAYSKMIEMSGHEPVDFKKPVEKVVEYIKAVFDLLNWNTDILGFNSNEELDNQPYYKLWHLLYSFEGDNTPTGNGRLIQKMTELYGFEKEYATILANVSFQDDYGSLSAKAIHKILPHLKEGNRYDVACVYAGYRHSESSLTREEIANKVLKDRLMLLPKNSLHNPVVEKILNQMVNVINVIIDIYGKPDEIRVELARELKKNAKEREELTKSIAQTTKAHEEYKTLLQTEFGLTNVSRTDILRYKLYKELESCGYKTLYSNTYISREKLFSKEFDIEHIIPQARLFDDSFSNKTLEARSVNIEKGNKTAYDFVKEKFGESGADNSLEHYLNNIEDLFKSGKISKTKYNKLKMAEQDIPDGFIERDLRNTQYIAKKALSMLNEISHRVVATSGSVTDKLREDWQLIDVMKELNWEKYKALGLVEYFEDRDGRQIGRIKDWTKRNDHRHHAMDALTVAFTKDVFIQYFNNKNASLDPNANEHAIKNKYFQNGRAIAPMPLREFRAEAKKHLENTLISIKAKNKVITGNINKTRKKGGVNKNMQQTPRGQLHLETIYGSGKQYLTKEEKVNASFDMRKIGTVSKSAYRDALLKRLYENDNDPKKAFAGKNSLDKQPIWLDKEQMRKVPEKVKIVTLEAIYTIRKEISPDLKVDKVIDVGVRKILIDRLNEYGNDAKKAFSNLDKNPIWLNKEKGISIKRVTISGISNAQSLHVKKDKDGKPILDENGRNIPVDFVNTGNNHHVAVYYRPVIDKRGQLVVDEAGNPKYELEEVVVSFFEAVTRANLGLPIIDKDYKTTEGWQFLFSMKQNEYFVFPNEKTGFNPKEIDLLDVENYGLISPNLFRVQKFSLKNYVFRHHLETTIKDTSSILRGITWIDFRSSKGLDTIVKVRVNHIGQIVSVGEY

SEQ ID NO: 308 - protein, 1420 aa, Bifidobacterium bifidum
MSRKNYVDDYAISLDIGNASVGWSAFTPNYRLVRAKGHELIGVRLFDPADTAESRRMARTTRRRYSRRRWRLRLLDALFDQALSEIDPSFLARRKYSWVHPDDENNADCWYGSVLFDSNEQDKRFYEKYPTIYHLRKALMEDDSQHDIREIYLAIHHMVKYRGNFLVEGTLESSNAFKEDELLKLLGRITRYEMSEGEQNSDIEQDDENKLVAPANGQLADALCATRGSRSMRVDNALEALSAVNDLSREQRAIVKAIFAGLEGNKLDLAKIFVSKEFSSENKKILGIYFNKSDYEEKCVQIVDSGLLDDEEREFLDRMQGQYNAIALKQLLGRSTSVSDSKCASYDAHRANWNLIKLQLRTKENEKDINENYGILVGWKIDSGQRKSVRGESAYENMRKKANVFFKKMIETSDLSETDKNRLIHDIEEDKLFPIQRDSDNGVIPHQLHQNELKQIIKKQGKYYPFLLDAFEKDGKQINKIEGLLTFRVPYFVGPLVVPEDLQKSDNSENHWMVRKKKGEITPWNFDEMVDKDASGRKFIERLVGTDSYLLGEPTLPKNSLLYQEYEVLNELNNVRLSVRTGNHWNDKRRMRLGREEKTLLCQRLFMKGQTVTKRTAENLLRKEYGRTYELSGLSDESKFTSSLSTYGKMCRIFGEKYVNEHRDLMEKIVELQTVFEDKETLLHQLRQLEGISEADCALLVNTHYTGWGRLSRKLLTTKAGECKISDDFAPRKHSIIEIMRAEDRNLMEIITDKQLGFSDWIEQENLGAENGSSLMEVVDDLRVSPKVKRGIIQSIRLIDDISKAVGKRPSRIFLELADDIQPSGRTISRKSRLQDLYRNANLGKEFKGIADELNACSDKDLQDDRLFLYYTQLGKDMYTGEELDLDRLSSAYDIDHIIPQAVTQNDSIDNRVLVARAENARKTDSFTYMPQIADRMRNFWQILLDNGLISRVKFERLTRQNEFSEREKERFVQRSLVETRQIMKNVATLMRQRYGNSAAVIGLNAELTKEMHRYLGFSHKNRDINDYHHAQDALCVGIAGQFAANRGFFADGEVSDGAQNSYNQYLRDYLRGYREKLSAEDRKQGRAFGFIVGSMRSQDEQKRVNPRTGEVVWSEEDKDYLRKVMNYRKMLVTQKVGDDFGALYDETRYAATDPKGIKGIPFDGAKQDTSLYGGFSSAKPAYAVLIESKGKTRLVNVTMQEYSLLGDRPSDDELRKVLAKKKSEYAKANILLRHVPKMQLIRYGGGLMVIKSAGELNNAQQLWLPYEEYCYFDDLSQGKGSLEKDDLKKLLDSILGSVQCLYPWHRFTEEELADLHVAFDKLPEDEKKNVITGIVSALHADAKTANLSIVGMTGSWRRMNNKSGYTFSDEDEFIFQSPSGLFEKRVTVGELKRKAKKEVNSKYRTNEKRLPTLSGASQP

SEQ ID NO: 309 - protein, 1397 aa, Veillonella atypica
METQTSNQLITSHLKDYPKQDYFVGLDIGTNSVGWAVTNTSYELLKFHSHKMWGSRLFEEGESAVTRRGFRSMRRRLERRKLRLKLLEELFADAMAQVDSTFFIRLHESKYHYEDKTTGHSSKHILFIDEDYTDQDYFTEYPTIYHLRKDLMENGTDDIRKLFLAVHHILKYRGNFLYEGATFNSNAFTFEDVLKQALVNITFNCFDTNSAISSISNILMESGKTKSDKAKAIERLVDTYTVFDEVNTPDKPQKEQVKEDKKTLKAFANLVLGLSANLIDLFGSVEDIDDDLKKLQIVGDTYDEKRDELAKVWGDEIHIIDDCKSVYDAIILMSIKEPGLTISQSKVKAFDKHKEDLVILKSLLKLDRNVYNEMFKSDKKGLHNYVHYIKQGRTEETSCSREDFYKYTKKIVEGLADSKDKEYILNEIELQTLLPLQRIKDNGVIPYQLHLEELKVILDKCGPKFPFLHTVSDGFSVTEKLIKMLEFRIPYYVGPLNTHHNIDNGGFSWAVRKQAGRVTPWNFEEKIDREKSAAAFIKNLTNKCTYLFGEDVLPKSSLLYSEFMLLNELNNVRIDGKALAQGVKQHLIDSIFKQDHKKMTKNRIELFLKDNNYITKKHKPEITGLDGEIKNDLTSYRDMVRILGNNFDVSMAEDIITDITIFGESKKMLRQTLRNKFGSQLNDETIKKLSKLRYRDWGRLSKKLLKGIDGCDKAGNGAPKTIIELMRNDSYNLMEILGDKFSFMECIEEENAKLAQGQVVNPHDIIDELALSPAVKRAVWQALRIVDEVAHIKKALPSRIFVEVARTNKSEKKKKDSRQKRLSDLYSAIKKDDVLQSGLQDKEFGALKSGLANYDDAALRSKKLYLYYTQMGRCAYTGNIIDLNQLNTDNYDIDHIYPRSLTKDDSFDNLVLCERTANAKKSDIYPIDNRIQTKQKPFWAFLKHQGLISERKYERLTRIAPLTADDLSGFIARQLVETNQSVKATTTLLRRLYPDIDVVFVKAENVSDFRHNNNFIKVRSLNHHHHAKDAYLNIVVGNVYHEKFTRNFRLFFKKNGANRTYNLAKMFNYDVICTNAQDGKAWDVKTSMNTVKKMMASNDVRVTRRLLEQSGALADATIYKASVAAKAKDGAYIGMKTKYSVFADVTKYGGMTKIKNAYSIIVQYTGKKGEEIKEIVPLPIYLINRNATDIELIDYVKSVIPKAKDISIKYRKLCINQLVKVNGFYYYLGGKTNDKIYIDNAIELVVPHDIATYIKLLDKYDLLRKENKTLKASSITTSIYNINTSTVVSLNKVGIDVFDYFMSKLRTPLYMKMKGNKVDELSSTGRSKFIKMTLEEQSIYLLEVLNLLTNSKTTFDVKPLGITGSRSTIGVKIHNLDEFKIINESITGLYSNEVTIV

SEQ ID NO: 310 - protein, 1363 aa, Lactobacillus rhamnosus
MTKLNQPYGIGLDIGSNSIGFAVVDANSHLLRLKGETAIGARLFREGQSAADRRGSRTTRRRLSRTRWRLSFLRDFFAPHITKIDPDFFLRQKYSEISPKDKDRFKYEKRLFNDRTDAEFYEDYPSMYHLRLHLMTHTHKADPREIFLAIHHILKSRGHFLTPGAAKDFNTDKVDLEDIFPALTEAYAQVYPDLELTFDLAKADDFKAKLLDEQATPSDTQKALVNLLLSSDGEKEIVKKRKQVLTEFAKAITGLKTKFNLALGTEVDEADASNWQFSMGQLDDKWSNIETSMTDQGTEIFEQIQELYRARLLNGIVPAGMSLSQAKVADYGQHKEDLELFKTYLKKLNDHELAKTIRGLYDRYINGDDAKPFLREDFVKALTKEVTAHPNEVSEQLLNRMGQANFMLKQRTKANGAIPIQLQQRELDQIIANQSKYYDWLAAPNPVEAHRWKMPYQLDELLNFHIPYYVGPLITPKQQAESGENVFAWMVRKDPSGNITPYNFDEKVDREASANTFIQRMKTTDTYLIGEDVLPKQSLLYQKYEVLNELNNVRINNECLGTDQKQRLIREVFERHSSVTIKQVADNLVAHGDFARRPEIRGLADEKRFLSSLSTYHQLKEILHEAIDDPTKLLDIENIITWSTVFEDHTIFETKLAEIEWLDPKKINELSGIRYRGWGQFSRKLLDGLKLGNGHTVIQELMLSNHNLMQILADETLKETMTELNQDKLKTDDIEDVINDAYTSPSNKKALRQVLRVVEDIKHAANGQDPSWLFIETADGTGTAGKRTQSRQKQIQTVYANAAQELIDSAVRGELEDKIADKASFTDRLVLYFMQGGRDIYTGAPLNIDQLSHYDIDHILPQSLIKDDSLDNRVLVNATINREKNNVFASTLFAGKMKATWRKWHEAGLISGRKLRNLMLRPDEIDKFAKGFVARQLVETRQIIKLTEQIAAAQYPNTKIIAVKAGLSHQLREELDFPKNRDVNHYHHAFDAFLAARIGTYLLKRYPKLAPFFTYGEFAKVDVKKFREFNFIGALTHAKKNIIAKDTGEIVWDKERDIRELDRIYNFKRMLITHEVYFETADLFKQTIYAAKDSKERGGSKQLIPKKQGYPTQVYGGYTQESGSYNALVRVAEADTTAYQVIKISAQNASKIASANLKSREKGKQLLNEIVVKQLAKRRKNWKPSANSFKIVIPRFGMGTLFQNAKYGLFMVNSDTYYRNYQELWLSRENQKLLKKLFSIKYEKTQMNHDALQVYKAIIDQVEKFFKLYDINQFRAKLSDAIERFEKLPINTDGNKIGKTETLRQILIGLQANGTRSNVKNLGIKTDLGLLQVGSGIKLDKDTQIVYQSPSGLFKRRIPLADL

SEQ ID NO: 311 - protein, 1365 aa, Filifactor alocis
MTKEYYLGLDVGTNSVGWAVTDSQYNLCKFKKKDMWGIRLFESANTAKDRRLQRGNRRRLERKKQRIDLLQEIFSPEICKIDPTFFIRLNESRLHLEDKSNDFKYPLFIEKDYSDIEYYKEFPTIFHLRKHLIESEEKQDIRLIYLALHNIIKTRGHFLIDGDLQSAKQLRPILDTFLLSLQEEQNLSVSLSENQKDEYEEILKNRSIAKSEKVKKLKNLFEISDELEKEEKKAQSAVIENFCKFIVGNKGDVCKFLRVSKEELEIDSFSFSEGKYEDDIVKNLEEKVPEKVYLFEQMKAMYDWNILVDILETEEYISFAKVKQYEKHKTNLRLLRDIILKYCTKDEYNRMFNDEKEAGSYTAYVGKLKKNNKKYWIEKKRNPEEFYKSLGKLLDKIEPLKEDLEVLTMMIEECKNHTLLPIQKNKDNGVIPHQVHEVELKKILENAKKYYSFLTETDKDGYSVVQKIESIFRFRIPYYVGPLSTRHQEKGSNVWMVRKPGREDRIYPWNMEEIIDFEKSNENFITRMTNKCTYLIGEDVLPKHSLLYSKYMVLNELNNVKVRGKKLPTSLKQKVFEDLFENKSKVTGKNLLEYLQIQDKDIQIDDLSGFDKDFKTSLKSYLDFKKQIFGEEIEKESIQNMIEDIIKWITIYGNDKEMLKRVIRANYSNQLTEEQMKKITGFQYSGWGNFSKMFLKGISGSDVSTGETFDIITAMWETDNNLMQILSKKFTFMDNVEDFNSGKVGKIDKITYDSTVKEMFLSPENKRAVWQTIQVAEEIKKVMGCEPKKIFIEMARGGEKVKKRTKSRKAQLLELYAACEEDCRELIKEIEDRDERDFNSMKLFLYYTQFGKCMYSGDDIDINELIRGNSKWDRDHIYPQSKIKDDSIDNLVLVNKTYNAKKSNELLSEDIQKKMHSFWLSLLNKKLITKSKYDRLTRKGDFTDEELSGFIARQLVETRQSTKAIADIFKQIYSSEVVYVKSSLVSDFRKKPLNYLKSRRVNDYHHAKDAYLNIVVGNVYNKKFTSNPIQWMKKNRDTNYSLNKVFEHDVVINGEVIWEKCTYHEDTNTYDGGTLDRIRKIVERDNILYTEYAYCEKGELFNATIQNKNGNSTVSLKKGLDVKKYGGYFSANTSYFSLIEFEDKKGDRARHIIGVPIYIANMLEHSPSAFLEYCEQKGYQNVRILVEKIKKNSLLIINGYPLRIRGENEVDTSFKRAIQLKLDQKNYELVRNIEKFLEKYVEKKGNYPIDENRDHITHEKMNQLYEVLLSKMKKFNKKGMADPSDRIEKSKPKFIKLEDLIDKINVINKMLNLLRCDNDTKADLSLIELPKNAGSFVVKKNTIGKSKIILVNQSVTGLYENRREL

SEQ ID NO: 312 - protein, 1389 aa, Oenococcus kitaharae
MARDYSVGLDIGTSSVGWAAIDNKYHLIRAKSKNLIGVRLFDSAVTAEKRRGYRTTRRRLSRRHWRLRLLNDIFAGPLTDFGDENFLARLKYSWVHPQDQSNQAHFAAGLLFDSKEQDKDFYRKYPTIYHLRLALMNDDQKHDLREVYLAIHHLVKYRGHFLIEGDVKADSAFDVHTFADAIQRYAESNNSDENLLGKIDEKKLSAALTDKHGSKSQRAETAETAFDILDLQSKKQIQAILKSVVGNQANLMAIFGLDSSAISKDEQKNYKFSFDDADIDEKIADSEALLSDTEFEFLCDLKAAFDGLTLKMLLGDDKTVSAAMVRRFNEHQKDWEYIKSHIRNAKNAGNGLYEKSKKFDGINAAYLALQSDNEDDRKKAKKIFQDEISSADIPDDVKADFLKKIDDDQFLPIQRTKNNGTIPHQLHRNELEQIIEKQGIYYPFLKDTYQENSHELNKITALINFRVPYYVGPLVEEEQKIADDGKNIPDPTNHWMVRKSNDTITPWNLSQVVDLDKSGRRFIERLTGTDTYLIGEPTLPKNSLLYQKFDVLQELNNIRVSGRRLDIRAKQDAFEHLFKVQKTVSATNLKDFLVQAGYISEDTQIEGLADVNGKNFNNALTTYNYLVSVLGREFVENPSNEELLEEITELQTVFEDKKVLRRQLDQLDGLSDHNREKLSRKHYTGWGRISKKLLTTKIVQNADKIDNQTFDVPRMNQSIIDTLYNTKMNLMEIINNAEDDFGVRAWIDKQNTTDGDEQDVYSLIDELAGPKEIKRGIVQSFRILDDITKAVGYAPKRVYLEFARKTQESHLTNSRKNQLSTLLKNAGLSELVTQVSQYDAAALQNDRLYLYFLQQGKDMYSGEKLNLDNLSNYDIDHIIPQAYTKDNSLDNRVLVSNITNRRKSDSSNYLPALIDKMRPFWSVLSKQGLLSKHKFANLTRTRDFDDMEKERFIARSLVETRQIIKNVASLIDSHFGGETKAVAIRSSLTADMRRYVDIPKNRDINDYHHAFDALLFSTVGQYTENSGLMKKGQLSDSAGNQYNRYIKEWIHAARLNAQSQRVNPFGFVVGSMRNAAPGKLNPETGEITPEENADWSIADLDYLHKVMNFRKITVTRRLKDQKGQLYDESRYPSVLHDAKSKASINFDKHKPVDLYGGFSSAKPAYAALIKFKNKFRLVNVLRQWTYSDKNSEDYILEQIRGKYPKAEMVLSHIPYGQLVKKDGALVTISSATELHNFEQLWLPLADYKLINTLLKTKEDNLVDILHNRLDLPEMTIESAFYKAFDSILSFAFNRYALHQNALVKLQAHRDDFNALNYEDKQQTLERILDALHASPASSDLKKINLSSGFGRLFSPSHFTLADTDEFIFQSVTGLFSTQKTVAQLYQETK

SEQ ID NO: 313 - protein, 1323 aa, Fructobacillus fructosus
MVYDVGLDIGTGSVGWVALDENGKLARAKGKNLVGVRLFDTAQTAADRRGFRTTRRRLSRRKWRLRLLDELFSAEINEIDSSFFQRLKYSYVHPKDEENKAHYYGGYLFPTEEETKKFHRSYPTIYHLRQELMAQPNKRFDIREIYLAIHHLVKYRGHFLSSQEKITIGSTYNPEDLANAIEVYADEKGLSWELNNPEQLTEIISGEAGYGLNKSMKADEALKLFEFDNNQDKVAIKTLLAGLTGNQIDFAKLFGKDISDKDEAKLWKLKLDDEALEEKSQTILSQLTDEEIELFHAVVQAYDGFVLIGLLNGADSVSAAMVQLYDQHREDRKLLKSLAQKAGLKHKRFSEIYEQLALATDEATIKNGISTARELVEESNLSKEVKEDTLRRLDENEFLPKQRTKANSVIPHQLHLAELQKILQNQGQYYPFLLDTFEKEDGQDNKIEELLRFRIPYYVGPLVTKKDVEHAGGDADNHWVERNEGFEKSRVTPWNFDKVFNRDKAARDFIERLTGNDTYLIGEKTLPQNSLRYQLFTVLNELNNVRVNGKKFDSKTKADLINDLFKARKTVSLSALKDYLKAQGKGDVTITGLADESKFNSSLSSYNDLKKTFDAEYLENEDNQETLEKIIEIQTVFEDSKIASRELSKLPLDDDQVKKLSQTHYTGWGRLSEKLLDSKIIDERGQKVSILDKLKSTSQNFMSIINNDKYGVQAWITEQNTGSSKLTFDEKVNELTTSPANKRGIKQSFAVLNDIKKAMKEEPRRVYLEFAREDQTSVRSVPRYNQLKEKYQSKSLSEEAKVLKKTLDGNKNKMSDDRYFLYFQQQGKDMYTGRPINFERLSQDYDIDHIIPQAFTKDDSLDNRVLVSRPENARKSDSFAYTDEVQKQDGSLWTSLLKSGFINRKKYERLTKAGKYLDGQKTGFIARQLVETRQIIKNVASLIEGEYENSKAVAIRSEITADMRLLVGIKKHREINSFHHAFDALLITAAGQYMQNRYPDRDSTNVYNEFDRYTNDYLKNLRQLSSRDEVRRLKSFGFVVGTMRKGNEDWSEENTSYLRKVMMFKNILTTKKTEKDRGPLNKETIFSPKSGKKLIPLNSKRSDTALYGGYSNVYSAYMTLVRANGKNLLIKIPISIANQIEVGNLKINDYIVNNPAIKKFEKILISKLPLGQLVNEDGNLIYLASNEYRHNAKQLWLSTTDADKIASISENSSDEELLEAYDILTSENVKNRFPFFKKDIDKLSQVRDEFLDSDKRIAVIQTILRGLQIDAAYQAPVKIISKKVSDWHKLQQSGGIKLSDNSEMIYQSATGIFETRVKISDLL

SEQ ID NO: 314 - protein, 1329 aa, Catenibacterium mitsuokai
IVDYCIGLDLGTGSVGWAVVDMNHRLMKRNGKHLWGSRLFSNAETAANRRASRSIRRRYNKRRERIRLLRAILQDMVLEKDPTFFIRLEHTSFLDEEDKAKYLGTDYKDNYNLFIDEDFNDYTYYHKYPTIYHLRKALCESTEKADPRLIYLALHHIVKYRGNFLYEGQKFNMDASNIEDKLSDIFTQFTSFNNIPYEDDEKKNLEILEILKKPLSKKAKVDEVMTLIAPEKDYKSAFKELVTGIAGNKMNVTKMILCEPIKQGDSEIKLKFSDSNYDDQFSEVEKDLGEYVEFVDALHNVYSWVELQTIMGATHTDNASISEAMVSRYNKHHDDLKLLKDCIKNNVPNKYFDMFRNDSEKSKGYYNYINRPSKAPVDEFYKYVKKCIEKVDTPEAKQILNDIELENFLLKQNSRTNGSVPYQMQLDEMIKIIDNQAEYYPILKEKREQLLSILTFRIPYYFGPLNETSEHAWIKRLEGKENQRILPWNYQDIVDVDATAEGFIKRMRSYCTYFPDEEVLPKNSLIVSKYEVYNELNKIRVDDKLLEVDVKNDIYNELFMKNKTVTEKKLKNWLVNNQCCSKDAEIKGFQKENQFSTSLTPWIDFTNIFGKIDQSNFDLIENIIYDLTVFEDKKIMKRRLKKKYALPDDKVKQILKLKYKDWSRLSKKLLDGIVADNRFGSSVTVLDVLEMSRLNLMEIINDKDLGYAQMIEEATSCPEDGKFTYEEVERLAGSPALKRGIWQSLQIVEEITKVMKCRPKYIYIEFERSEEAKERTESKIKKLENVYKDLDEQTKKEYKSVLEELKGFDNTKKISSDSLFLYFTQLGKCMYSGKKLDIDSLDKYQIDHIVPQSLVKDDSFDNRVLVVPSENQRKLDDLVVPFDIRDKMYRFWKLLFDHELISPKKFYSLIKTEYTERDEERFINRQLVETRQITKNVTQIIEDHYSTTKVAAIRANLSHEFRVKNHIYKNRDINDYHHAHDAYIVALIGGFMRDRYPNMHDSKAVYSEYMKMFRKNKNDQKRWKDGFVINSMNYPYEVDGKLIWNPDLINEIKKCFYYKDCYCTTKLDQKSGQLFNLTVLSNDAHADKGVTKAVVPVNKNRSDVHKYGGFSGLQYTIVAIEGQKKKGKKTELVKKISGVPLHLKAASINEKINYIEEKEGLSDVRIIKDNIPVNQMIEMDGGEYLLTSPTEYVNARQLVLNEKQCALIADIYNAIYKQDYDNLDDILMIQLYIELTNKMKVLYPAYRGIAEKFESMNENYVVISKEEKANIIKQMLIVMHRGPQNGNIVYDDFKISDRIGRLKTKNHNLNNIVFISQSPTGIYTKKYKL

SEQ ID NO: 315 - protein, 1348 aa, Finegoldia magna
MKSEKKYYIGLDVGTNSVGWAVTDEFYNILRAKGKDLWGVRLFEKADTAANTRIFRSGRRRNDRKGMRLQILREIFEDEIKKVDKDFYDRLDESKFWAEDKKVSGKYSLFNDKNFSDKQYFEKFPTIFHLRKYLMEEHGKVDIRYYFLAINQMMKRRGHFLIDGQISHVTDDKPLKEQLILLINDLLKIELEEELMDSIFEILADVNEKRTDKKNNLKELIKGQDFNKQEGNILNSIFESIVTGKAKIKNIISDEDILEKIKEDNKEDFVLTGDSYEENLQYFEEVLQENITLFNTLKSTYDFLILQSILKGKSTLSDAQVERYDEHKKDLEILKKVIKKYDEDGKLFKQVFKEDNGNGYVSYIGYYLNKNKKITAKKKISNIEFTKYVKGILEKQCDCEDEDVKYLLGKIEQENFLLKQISSINSVIPHQIHLFELDKILENLAKNYPSFNNKKEEFTKIEKIRKTFTFRIPYYVGPLNDYHKNNGGNAWIFRNKGEKIRPWNFEKIVDLHKSEEEFIKRMLNQCTYLPEETVLPKSSILYSEYMVLNELNNLRINGKPLDTDVKLKLIEELFKKKTKVTLKSIRDYMVRNNFADKEDFDNSEKNLEIASNMKSYIDFNNILEDKFDVEMVEDLIEKITIHTGNKKLLKKYIEETYPDLSSSQIQKIINLKYKDWGRLSRKLLDGIKGTKKETEKTDTVINFLRNSSDNLMQIIGSQNYSFNEYIDKLRKKYIPQEISYEVVENLYVSPSVKKMIWQVIRVTEEITKVMGYDPDKIFIEMAKSEEEKKTTISRKNKLLDLYKAIKKDERDSQYEKLLTGLNKLDDSDLRSRKLYLYYTQMGRDMYTGEKIDLDKLFDSTHYDKDHIIPQSMKKDDSIINNLVLVNKNANQTTKGNIYPVPSSIRNNPKIYNYWKYLMEKEFISKEKYNRLIRNTPLTNEELGGFINRQLVETRQSTKAIKELFEKFYQKSKIIPVKASLASDLRKDMNTLKSREVNDLHHAHDAFLNIVAGDVWNREFTSNPINYVKENREGDKVKYSLSKDFTRPRKSKGKVIWTPEKGRKLIVDTLNKPSVLISNESHVKKGELFNATIAGKKDYKKGKIYLPLKKDDRLQDVSKYGGYKAINGAFFFLVEHTKSKKRIRSIELFPLHLLSKFYEDKNTVLDYAINVLQLQDPKIIIDKINYRTEIIIDNFSYLISTKSNDGSITVKPNEQMYWRVDEISNLKKIENKYKKDAILTEEDRKIMESYIDKIYQQFKAGKYKNRRTTDTIIEKYEIIDLDTLDNKQLYQLLVAFISLSYKTSNNAVDFTVIGLGTECGKPRITNLPDNTYLVYKSITGIYEKRIRIK

SEQ ID NO: 316 - protein, 1384 aa, Coriobacterium glomerans
MKLRGIEDDYSIGLDMGTSSVGWAVTDERGTLAHFKRKPTWGSRLFREAQTAAVARMPRGQRRRYVRRRWRLDLLQKLFEQQMEQADPDFFIRLRQSRLLRDDRAEEHADYRWPLFNDCKFTERDYYQRFPTIYHVRSWLMETDEQADIRLIYLALHNIVKHRGNFLREGQSLSAKSARPDEALNHLRETLRVWSSERGFECSIADNGSILAMLTHPDLSPSDRRKKIAPLFDVKSDDAAADKKLGIALAGAVIGLKTEFKNIFGDFPCEDSSIYLSNDEAVDAVRSACPDDCAELFDRLCEVYSAYVLQGLLSYAPGQTISANMVEKYRRYGEDLALLKKLVKIYAPDQYRMFFSGATYPGTGIYDAAQARGYTKYNLGPKKSEYKPSESMQYDDFRKAVEKLFAKTDARADERYRMMMDRFDKQQFLRRLKTSDNGSIYHQLHLEELKAIVENQGRFYPFLKRDADKLVSLVSFRIPYYVGPLSTRNARTDQHGENRFAWSERKPGMQDEPIFPWNWESIIDRSKSAEKFILRMTGMCTYLQQEPVLPKSSLLYEEFCVLNELNGAHWSIDGDDEHRFDAADREGIIEELFRRKRTVSYGDVAGWMERERNQIGAHVCGGQGEKGFESKLGSYIFFCKDVFKVERLEQSDYPMIERIILWNTLFEDRKILSQRLKEEYGSRLSAEQIKTICKKRFTGWGRLSEKFLTGITVQVDEDSVSIMDVLREGCPVSGKRGRAMVMMEILRDEELGFQKKVDDFNRAFFAENAQALGVNELPGSPAVRRSLNQSIRIVDEIASIAGKAPANIFIEVTRDEDPKKKGRRTKRRYNDLKDALEAFKKEDPELWRELCETAPNDMDERLSLYFMQRGKCLYSGRAIDIHQLSNAGIYEVDHIIPRTYVKDDSLENKALVYREENQRKTDMLLIDPEIRRRMSGYWRMLHEAKLIGDKKFRNLLRSRIDDKALKGFIARQLVETGQMVKLVRSLLEARYPETNIISVKASISHDLRTAAELVKCREANDFHHAHDAFLACRVGLFIQKRHPCVYENPIGLSQVVRNYVRQQADIFKRCRTIPGSSGFIVNSFMTSGFDKETGEIFKDDWDAEAEVEGIRRSLNFRQCFISRMPFEDHGVFWDATIYSPRAKKTAALPLKQGLNPSRYGSFSREQFAYFFIYKARNPRKEQTLFEFAQVPVRLSAQIRQDENALERYARELAKDQGLEFIRIERSKILKNQLIEIDGDRLCITGKEEVRNACELAFAQDEMRVIRMLVSEKPVSRECVISLFNRILLHGDQASRRLSKQLKLALLSEAFSEASDNVQRNVVLGLIAIFNGSTNMVNLSDIGGSKFAGNVRIKYKKELASPKVNVHLIDQSVTGMFERRTKIGL

SEQ ID NO: 317 - protein, 1391 aa, Eubacterium yurii
MENKQYYIGLDVGTNSVGWAVTDTSYNLLRAKGKDMWGARLFEKANTAAERRTKRTSRRRSEREKARKAMLKELFADEINRVDPSFFIRLEESKFFLDDRSENNRQRYTLFNDATFTDKDYYEKYKTIFHLRSALINSDEKFDVRLVFLAILNLFSHRGHFLNASLKGDGDIQGMDVFYNDLVESCEYFEIELPRITNIDNFEKILSQKGKSRTKILEELSEELSISKKDKSKYNLIKLISGLEASVVELYNIEDIQDENKKIKIGFRESDYEESSLKVKEIIGDEYFDLVERAKSVHDMGLLSNIIGNSKYLCEARVEAYENHHKDLLKIKELLKKYDKKAYNDMFRKMTDKNYSAYVGSVNSNIAKERRSVDKRKIEDLYKYIEDTALKNIPDDNKDKIEILEKIKLGEFLKKQLTASNGVIPNQLQSRELRAILKKAENYLPFLKEKGEKNLTVSEMIIQLFEFQIPYYVGPLDKNPKKDNKANSWAKIKQGGRILPWNFEDKVDVKGSRKEFIEKMVRKCTYISDEHTLPKQSLLYEKFMVLNEINNIKIDGEKISVEAKQKIYNDLFVKGKKVSQKDIKKELISLNIMDKDSVLSGTDTVCNAYLSSIGKFTGVFKEEINKQSIVDMIEDIIFLKTVYGDEKRFVKEEIVEKYGDEIDKDKIKRILGFKFSNWGNLSKSFLELEGADVGTGEVRSIIQSLWETNFNLMELLSSRFTYMDELEKRVKKLEKPLSEWTIEDLDDMYLSSPVKRMIWQSMKIVDEIQTVIGYAPKRIFVEMTRSEGEKVRTKSRKDRLKELYNGIKEDSKQWVKELDSKDESYFRSKKMYLYYLQKGRCMYSGEVIELDKLMDDNLYDIDHIYPRSFVKDDSLDNLVLVKKEINNRKQNDPITPQIQASCQGFWKILHDQGFMSNEKYSRLTRKTQEFSDEEKLSFINRQIVETGQATKCMAQILQKSMGEDVDVVFSKARLVSEFRHKFELFKSRLINDFHHANDAYLNIVVGNSYFVKFTRNPANFIKDARKNPDNPVYKYHMDRFFERDVKSKSEVAWIGQSEGNSGTIVIVKKTMAKNSPLITKKVEEGHGSITKETIVGVKEIKFGRNKVEKADKTPKKPNLQAYRPIKTSDERLCNILRYGGRTSISISGYCLVEYVKKRKTIRSLEAIPVYLGRKDSLSEEKLLNYFRYNLNDGGKDSVSDIRLCLPFISTNSLVKIDGYLYYLGGKNDDRIQLYNAYQLKMKKEEVEYIRKIEKAVSMSKFDEIDREKNPVLTEEKNIELYNKIQDKFENTVFSKRMSLVKYNKKDLSFGDFLKNKKSKFEEIDLEKQCKVLYNIIFNLSNLKEVDLSDIGGSKSTGKCRCKKNITNYKEFKLIQQSITGLYSCEKDLMTI

SEQ ID NO: 318 - protein, 1364 aa, Peptoniphilus duerdenii
MKNLKEYYIGLDIGTASVGWAVTDESYNIPKFNGKKMWGVRLFDDAKTAEERRTQRGSRRRLNRRKERINLLQDLFATEISKVDPNFFLRLDNSDLYREDKDEKLKSKYTLFNDKDFKDRDYHKKYPTIHHLIMDLIEDEGKKDIRLLYLACHYLLKNRGHFIFEGQKFDTKNSFDKSINDLKIHLRDEYNIDLEFNNEDLIEIITDTTLNKTNKKKELKNIVGDTKFLKAISAIMIGSSQKLVDLFEDGEFEETTVKSVDFSTTAFDDKYSEYEEALGDTISLLNILKSIYDSSILENLLKDADKSKDGNKYISKAFVKKFNKHGKDLKTLKRIIKKYLPSEYANIFRNKSINDNYVAYTKSNITSNKRTKASKFTKQEDFYKFIKKHLDTIKETKLNSSENEDLKLIDEMLTDIEFKTFIPKLKSSDNGVIPYQLKLMELKKILDNQSKYYDFLNESDEYGTVKDKVESIMEFRIPYYVGPLNPDSKYAWIKRENTKITPWNFKDIVDLDSSREEFIDRLIGRCTYLKEEKVLPKASLIYNEFMVLNELNNLKLNEFLITEEMKKAIFEELFKTKKKVTLKAVSNLLKKEFNLTGDILLSGTDGDFKQGLNSYIDFKNIIGDKVDRDDYRIKIEEIIKLIVLYEDDKTYLKKKIKSAYKNDFTDDEIKKIAALNYKDWGRLSKRFLTGIEGVDKTTGEKGSIIYFMREYNLNLMELMSGHYTFTEEVEKLNPVENRELCYEMVDELYLSPSVKRMLWQSLRVVDEIKRIIGKDPKKIFIEMARAKEAKNSRKESRKNKLLEFYKFGKKAFINEIGEERYNYLLNEINSEEESKFRWDNLYLYYTQLGRCMYSLEPIDLADLKSNNIYDQDHIYPKSKIYDDSLENRVLVKKNLNHEKGNQYPIPEKVLNKNAYGFWKILFDKGLIGQKKYTRLTRRTPFEERELAEFIERQIVETRQATKETANLLKNICQDSEIVYSKAENASRFRQEFDIIKCRTVNDLHHMHDAYLNIVVGNVYNTKFTKNPLNFIKDKDNVRSYNLENMFKYDVVRGSYTAWIADDSEGNVKAATIKKVKRELEGKNYRFTRMSYIGTGGLYDQNLMRKGKGQIPQKENTNKSNIEKYGGYNKASSAYFALIESDGKAGRERTLETIPIMVYNQEKYGNTEAVDKYLKDNLELQDPKILKDKIKINSLIKLDGFLYNIKGKTGDSLSIAGSVQLIVNKEEQKLIKKMDKFLVKKKDNKDIKVTSFDNIKEEELIKLYKTLSDKLNNGIYSNKRNNQAKNISEALDKFKEISIEEKIDVLNQIILLFQSYNNGCNLKSIGLSAKTGVVFIPKKLNYKECKLINQSITGLFENEVDLLNL

SEQ ID NO: 319 - protein, 1358 aa, Acidaminococcus sp.
MGKMYYLGLDIGTNSVGYAVTDPSYHLLKFKGEPMWGAHVFAAGNQSAERRSFRTSRRRLDRRQQRVKLVQEIFAPVISPIDPRFFIRLHESALWRDDVAETDKHIFFNDPTYTDKEYYSDYPTIHHLIVDLMESSEKHDPRLVYLAVAWLVAHRGHFLNEVDKDNIGDVLSFDAFYPEFLAFLSDNGVSPWVCESKALQATLLSRNSVNDKYKALKSLIFGSQKPEDNFDANISEDGLIQLLAGKKVKVNKLFPQESNDASFTLNDKEDAIEEILGTLTPDECEWIAHIRRLFDWAIMKHALKDGRTISESKVKLYEQHHHDLTQLKYFVKTYLAKEYDDIFRNVDSETTKNYVAYSYHVKEVKGTLPKNKATQEEFCKYVLGKVKNIECSEADKVDFDEMIQRLTDNSFMPKQVSGENRVIPYQLYYYELKTILNKAASYLPFLTQCGKDAISNQDKLLSIMTFRIPYFVGPLRKDNSEHAWLERKAGKIYPWNFNDKVDLDKSEEAFIRRMTNTCTYYPGEDVLPLDSLIYEKFMILNEINNIRIDGYPISVDVKQQVFGLFEKKRRVTVKDIQNLLLSLGALDKHGKLTGIDTTIHSNYNTYHHFKSLMERGVLTRDDVERIVERMTYSDDTKRVRLWLNNNYGTLTADDVKHISRLRKHDFGRLSKMFLTGLKGVHKETGERASILDFMWNTNDNLMQLLSECYTFSDEITKLQEAYYAKAQLSLNDFLDSMYISNAVKRPIYRTLAVVNDIRKACGTAPKRIFIEMARDGESKKKRSVTRREQIKNLYRSIRKDFQQEVDFLEKILENKSDGQLQSDALYLYFAQLGRDMYTGDPIKLEHIKDQSFYNIDHIYPQSMVKDDSLDNKVLVQSEINGEKSSRYPLDAAIRNKMKPLWDAYYNHGLISLKKYQRLTRSTPFTDDEKWDFINRQLVETRQSTKALAILLKRKFPDTEIVYSKAGLSSDFRHEFGLVKSRNINDLHHAKDAFLAIVTGNVYHERFNRRWFMVNQPYSVKTKTLFTHSIKNGNFVAWNGEEDLGRIVKMLKQNKNTIHFTRFSFDRKEGLFDIQPLKASTGLVPRKAGLDVVKYGGYDKSTAAYYLLVRFTLEDKKTQHKLMMIPVEGLYKARIDHDKEFLTDYAQTTISEILQKDKQKVINIMFPMGTRHIKLNSMISIDGFYLSIGGKSSKGKSVLCHAMVPLIVPHKIECYIKAMESFARKFKENNKLRIVEKFDKITVEDNLNLYELFLQKLQHNPYNKFFSTQFDVLTNGRSTFTKLSPEEQVQTLLNILSIFKTCRSSGCDLKSINGSAQAARIMISADLTGLSKKYSDIRLVEQSASGLFVSKSQNLLEYL

SEQ ID NO: 320 - protein, 1356 aa, Lactobacillus farciminis
MTKKEQPYNIGLDIGTSSVGWAVTNDNYDLLNIKKKNLWGVRLFEEAQTAKETRLNRSTRRRYRRRKNRINWLNEIFSEELAKTDPSFLIRLQNSWVSKKDPDRKRDKYNLFIDGPYTDKEYYREFPTIFHLRKELILNKDKADIRLIYLALHNILKYRGNFTYEHQKFNISNLNNNLSKELIELNQQLIKYDISFPDDCDWNHISDILIGRGNATQKSSNILKDFTLDKETKKLLKEVINLILGNVAHLNTIFKTSLTKDEEKLNFSGKDIESKLDDLDSILDDDQFTVLDAANRIYSTITLNEILNGESYFSMAKVNQYENHAIDLCKLRDMWHTTKNEEAVEQSRQAYDDYINKPKYGTKELYTSLKKFLKVALPTNLAKEAEEKISKGTYLVKPRNSENGVVPYQLNKIEMEKIIDNQSQYYPFLKENKEKLLSILSFRIPYYVGPLQSAEKNPFAWMERKSNGHARPWNFDEIVDREKSSNKFIRRMTVTDSYLVGEPVLPKNSLIYQRYEVLNELNNIRITENLKTNPIGSRLTVETKQRIYNELFKKYKKVTVKKLTKWLIAQGYYKNPILIGLSQKDEFNSTLTTYLDMKKIFGSSFMEDNKNYDQIEELIEWLTIFEDKQILNEKLHSSKYSYTPDQIKKISNMRYKGWGRLSKKILMDITTETNTPQLLQLSNYSILDLMWATNNNFISIMSNDKYDFKNYIENHNLNKNEDQNISDLVNDIHVSPALKRGITQSIKIVQEIVKFMGHAPKHIFIEVTRETKKSEITTSREKRIKRLQSKLLNKANDFKPQLREYLVPNKKIQEELKKHKNDLSSERIMLYFLQNGKSLYSEESLNINKLSDYQVDHILPRTYIPDDSLENKALVLAKENQRKADDLLLNSNVIDRNLERWTYMLNNNMIGLKKFKNLTRRVITDKDKLGFIHRQLVQTSQMVKGVANILDNMYKNQGTTCIQARANLSTAFRKALSGQDDTYHFKHPELVKNRNVNDFHHAQDAYLASFLGTYRLRRFPTNEMLLMNGEYNKFYGQVKELYSKKKKLPDSRKNGFIISPLVNGTTQYDRNTGEIIWNVGFRDKILKIFNYHQCNVTRKTEIKTGQFYDQTIYSPKNPKYKKLIAQKKDMDPNIYGGFSGDNKSSITIVKIDNNKIKPVAIPIRLINDLKDKKTLQNWLEENVKHKKSIQIIKNNVPIGQIIYSKKVGLLSLNSDREVANRQQLILPPEHSALLRLLQIPDEDLDQILAFYDKNILVEILQELITKMKKFYPFYKGEREFLIANIENFNQATTSEKVNSLEELITLLHANSTSAHLIFNNIEKKAFGRKTHGLTLNNTDFIYQSVTGLYETRIHIE

SEQ ID NO: 321 - protein, 1421 aa, Streptococcus sanguinis
MTKFNKNYSIGLDIGVSSVGYAVVTEDYRVPAFKFKVLGNTEKEKIKKNLIGSTTFVSAQPAKGTRVFRVNRRRIDRRNHRITYLRDIFQKEIEKVDKNFYRRLDESFRVLGDKSEDLQIKQPFFGDKELETAYHKKYPTIYHLRKHLADADKNSPVADIREVYMAISHILKYRGHFLTLDKINPNNINMQNSWIDFIESCQEVFDLEISDESKNIADIFKSSENRQEKVKKILPYFQQELLKKDKSIFKQLLQLLFGLKTKFKDCFELEEEPDLNFSKENYDENLENFLGSLEEDFSDVFAKLKVLRDTILLSGMLTYTGATHARFSATMVERYEEHRKDLQRFKFFIKQNLSEQDYLDIFGRKTQNGFDVDKETKGYVGYITNKMVLTNPQKQKTIQQNFYDYISGKITGIEGAEYFLNKISDGTFLRKLRTSDNGAIPNQIHAYELEKIIERQGKDYPFLLENKDKLLSILTFKIPYYVGPLAKGSNSRFAWIKRATSSDILDDNDEDTRNGKIRPWNYQKLINMDETRDAFITNLIGNDIILLNEKVLPKRSLIYEEVMLQNELTRVKYKDKYGKAHFFDSELRQNIINGLFKNNSKRVNAKSLIKYLSDNHKDLNAIEIVSGVEKGKSFNSTLKTYNDLKTIFSEELLDSEIYQKELEEIIKVITVFDDKKSIKNYLTKFFGHLEILDEEKINQLSKLRYSGWGRYSAKLLLDIRDEDTGFNLLQFLRNDEENRNLTKLISDNTLSFEPKIKDIQSKSTIEDDIFDEIKKLAGSPAIKRGILNSIKIVDELVQIIGYPPHNIVIEMARENMTTEEGQKKAKTRKTKLESALKNIENSLLENGKVPHSDEQLQSEKLYLYYLQNGKDMYTLDKTGSPAPLYLDQLDQYEVDHIIPYSFLPIDSIDNKVLTHRENNQQKLNNIPDKETVANMKPFWEKLYNAKLISQTKYQRLTTSERTPDGVLTESMKAGFIERQLVETRQIIKHVARILDNRFSDTKIITLKSQLITNFRNTFHIAKIRELNDYHHAHDAYLAVVVGQTLLKVYPKLAPELIYGHHAHFNRHEENKATLRKHLYSNIMRFFNNPDSKVSKDIWDCNRDLPIIKDVIYNSQINFVKRTMIKKGAFYNQNPVGKFNKQLAANNRYPLKTKALCLDTSIYGGYGPMNSALSIIIIAERFNEKKGKIETVKEFHDIFIIDYEKFNNNPFQFLNDTSENGFLKKNNINRVLGFYRIPKYSLMQKIDGTRMLFESKSNLHKATQFKLTKTQNELFFHMKRLLTKSNLMDLKSKSAIKESQNFILKHKEEFDNISNQLSAFSQKMLGNTTSLKNLIKGYNERKIKEIDIRDETIKYFYDNFIKMFSFVKSGAPKDINDFFDNKCTVARMRPKPDKKLLNATLIHQSITGLYETRIDLSKLGED

SEQ ID NO: 322 - protein, 1338 aa, Coprococcus catus
MKQEYFLGLDMGTGSLGWAVTDSTYQVMRKHGKALWGTRLFESASTAEERRMFRTARRRLDRRNWRIQVLQEIFSEEISKVDPGFFLRMKESKYYPEDKRDAEGNCPELPYALFVDDNYTDKNYHKDYPTIYHLRKMLMETTEIPDIRLVYLVLHHMMKHRGHFLLSGDISQIKEFKSTFEQLIQNIQDEELEWHISLDDAAIQFVEHVLKDRNLTRSTKKSRLIKQLNAKSACEKAILNLLSGGTVKLSDIFNNKELDESERPKVSFADSGYDDYIGIVEAELAEQYYIIASAKAVYDWSVLVEILGNSVSISEAKIKVYQKHQADLKTLKKIVRQYMTKEDYKRVFVDTEEKLNNYSAYIGMTKKNGKKVDLKSKQCTQADFYDFLKKNVIKVIDHKEITQEIESEIEKENFLPKQVTKDNGVIPYQVHDYELKKILDNLGTRMPFIKENAEKIQQLFEFRIPYYVGPLNRVDDGKDGKFTWSVRKSDARIYPWNFTEVIDVEASAEKFIRRMTNKCTYLVGEDVLPKDSLVYSKFMVLNELNNLRLNGEKISVELKQRIYEELFCKYRKVTRKKLERYLVIEGIAKKGVEITGIDGDFKASLTAYHDFKERLTDVQLSQRAKEAIVLNVVLFGDDKKLLKQRLSKMYPNLTTGQLKGICSLSYQGWGRLSKTFLEEITVPAPGTGEVWNIMTALWQTNDNLMQLLSRNYGFTNEVEEFNTLKKETDLSYKTVDELYVSPAVKRQIWQTLKVVKEIQKVMGNAPKRVFVEMAREKQEGKRSDSRKKQLVELYRACKNEERDWITELNAQSDQQLRSDKLFLYYIQKGRCMYSGETIQLDELWDNTKYDIDHIYPQSKTMDDSLNNRVLVKKNYNAIKSDTYPLSLDIQKKMMSFWKMLQQQGFITKEKYVRLVRSDELSADELAGFIERQIVETRQSTKAVATILKEALPDTEIVYVKAGNVSNFRQTYELLKVREMNDLHHAKDAYLNIVVGNAYFVKFTKNAAWFIRNNPGRSYNLKRMFEFDIERSGEIAWKAGNKGSIVTVKKVMQKNNILVTRKAYEVKGGLFDQQIMKKGKGQVPIKGNDERLADIEKYGGYNKAAGTYFMLVKSLDKKGKEIRTIEFVPLYLKNQIEINHESAIQYLAQERGLNSPEILLSKIKIDTLFKVDGFKMWLSGRTGNQLIFKGANQLILSHQEAAILKGVVKYVNRKNENKDAKLSERDGMTEEKLLQLYDTFLDKLSNTVYSIRLSAQIKTLTEKRAKFIGLSNEDQCIVLNEILHMFQCQSGSANLKLIGGPGSAGILVMNNNITACKQISVINQSPTGIYEKEIDLIKL

SEQ ID NO: 323 - protein, 1345 aa, Streptococcus mutans
MKKPYSIGLDIGTNSVGWAVVTDDYKVPAKKMKVLGNTDKSHIEKNLLGALLFDSGNTAEDRRLKRTARRRYTRRRNRILYLQEIFSEEMGKVDDSFFHRLEDSFLVTEDKRGERHPIFGNLEEEVKYHENFPTIYHLRQYLADNPEKVDLRLVYLALAHIIKFRGHFLIEGKFDTRNNDVQRLFQEFLAVYDNTFENSSLQEQNVQVEEILTDKISKSAKKDRVLKLFPNEKSNGRFAEFLKLIVGNQADFKKHFELEEKAPLQFSKDTYEEELEVLLAQIGDNYAELFLSAKKLYDSILLSGILTVTDVGTKAPLSASMIQRYNEHQMDLAQLKQFIRQKLSDKYNEVFSDVSKDGYAGYIDGKTNQEAFYKYLKGLLNKIEGSGYFLDKIEREDFLRKQRTFDNGSIPHQIHLQEMRAIIRRQAEFYPFLADNQDRIEKLLTFRIPYYVGPLARGKSDFAWLSRKSADKITPWNFDEIVDKESSAEAFINRMTNYDLYLPNQKVLPKHSLLYEKFTVYNELTKVKYKTEQGKTAFFDANMKQEIFDGVFKVYRKVTKDKLMDFLEKEFDEFRIVDLTGLDKENKVFNASYGTYHDLCKILDKDFLDNSKNEKILEDIVLTLTLFEDREMIRKRLENYSDLLTKEQVKKLERRHYTGWGRLSAELIHGIRNKESRKTILDYLIDDGNSNRNFMQLINDDALSFKEEIAKAQVIGETDNLNQVVSDIAGSPAIKKGILQSLKIVDELVKIMGHQPENIVVEMARENQFTNQGRRNSQQRLKGLTDSIKEFGSQILKEHPVENSQLQNDRLFLYYLQNGRDMYTGEELDIDYLSQYDIDHIIPQAFIKDNSIDNRVLTSSKENRGKSDDVPSKDVVRKMKSYWSKLLSAKLITQRKFDNLTKAERGGLTDDDKAGFIKRQLVETRQITKHVARILDERFNTETDENNKKIRQVKIVTLKSNLVSNFRKEFELYKVREINDYHHAHDAYLNAVIGKALLGVYPQLEPEFVYGDYPHFHGHKENKATAKKFFYSNIMNFFKKDDVRTDKNGEIIWKKDEHISNIKKVLSYPQVNIVKKVEEQTGGFSKESILPKGNSDKLIPRKTKKFYWDTKKYGGFDSPIVAYSILVIADIEKGKSKKLKTVKALVGVTIMEKMTFERDPVAFLERKGYRNVQEENIIKLPKYSLFKLENGRKRLLASARELQKGNEIVLPNHLGTLLYHAKNIHKVDEPKHLDYVDKHKDEFKELLDVVSNFSKKYTLAEGNLEKIKELYAQNNGEDLKELASSFINLLTFTAIGAPATFKFFDKNIDRKRYTSTTEILNATLIHQSITGLYETRIDLNKLGGD

SEQ ID NO: 324 - protein, 1368 aa, Streptococcus pyogenes [sequence omitted]

SEQ ID NO: 325 - protein, 1388 aa, Streptococcus thermophilus
MTKPYSIGLDIGTNSVGWAVTTDNYKVPSKKMKVLGNTSKKYIKKNLLGVLLFDSGITAEGRRLKRTARRRYTRRRNRILYLQEIFSTEMATLDDAFFQRLDDSFLVPDDKRDSKYPIFGNLVEEKAYHDEFPTIYHLRKYLADSTKKADLRLVYLALAHMIKYRGHFLIEGEFNSKNNDIQKNFQDFLDTYNAIFESDLSLENSKQLEEIVKDKISKLEKKDRILKLFPGEKNSGIFSEFLKLIVGNQADFRKCFNLDEKASLHFSKESYDEDLETLLGYIGDDYSDVFLKAKKLYDAILLSGFLTVTDNETEAPLSSAMIKRYNEHKEDLALLKEYIRNISLKTYNEVFKDDTKNGYAGYIDGKTNQEDFYVYLKKLLAEFEGADYFLEKIDREDFLRKQRTFDNGSIPYQIHLQEMRAILDKQAKFYPFLAKNKERIEKILTFRIPYYVGPLARGNSDFAWSIRKRNEKITPWNFEDVIDKESSAEAFINRMTSFDLYLPEEKVLPKHSLLYETFNVYNELTKVRFIAESMRDYQFLDSKQKKDIVRLYFKDKRKVTDKDIIEYLHAIYGYDGIELKGIEKQFNSSLSTYHDLLNIINDKEFLDDSSNEAIIEEIIHTLTIFEDREMIKQRLSKFENIFDKSVLKKLSRRHYTGWGKLSAKLINGIRDEKSGNTILDYLIDDGISNRNFMQLIHDDALSFKKKIQKAQIIGDEDKGNIKEVVKSLPGSPAIKKGILQSIKIVDELVKVMGGRKPESIVVEMARENQYTNQGKSNSQQRLKRLEKSLKELGSKILKENIPAKLSKIDNNALQNDRLYLYYLQNGKDMYTGDDLDIDRLSNYDIDHIIPQAFLKDNSIDNKVLVSSASNRGKSDDVPSLEVVKKRKTFWYQLLKSKLISQRKFDNLTKAERGGLSPEDKAGFIQRQLVETRQITKHVARLLDEKFNNKKDENNRAVRTVKIITLKSTLVSQFRKDFELYKVREINDFHHAHDAYLNAVVASALLKKYPKLEPEFVYGDYPKYNSFRERKSATEKVYFYSNIMNIFKKSISLADGRVIERPLIEVNEETGESVWNKESDLATVRRVLSYPQVNVVKKVEEQNHGLDRGKPKGLFNANLSSKPKPNSNENLVGAKEYLDPKKYGGYAGISNSFTVLVKGTIEKGAKKKITNVLEFQGISILDRINYRKDKLNFLLEKGYKDIELIIELPKYSLFELSDGSRRMLASILSTNNKRGEIHKGNQIFLSQKFVKLLYHAKRISNTINENHRKYVENHKKEFEELFYYILEFNENYVGAKKNGKLLNSAFQSWQNHSIDELCSSFIGPTGSERKGLFELTSRGSAADFEFLGVKIPRYRDYTPSSLLKDATLIHQSVTGLYETRIDLAKLGEG

SEQ ID NO: 326 - protein, 1374 aa, Fusobacterium nucleatum
MKKQKFSDYYLGFDIGTNSVGWCVTDLDYNVLRFNKKDMWGSRLFDEAKTAAERRVQRNSRRRLKRRKWRLNLLEEIFSDEIMKIDSNFFRRLKESSLWLEDKNSKEKFTLFNDDNYKDYDFYKQYPTIFHLRDELIKNPEKKDIRLIYLALHSIFKSRGHFLFEGQNLKEIKNFETLYNNLISFLEDNGINKSIDKDNIEKLEKIICDSGKGLKDKEKEFKGIFNSDKQLVAIFKLSVGSSVSLNDLFDTDEYKKEEVEKEKISFREQIYEDDKPIYYSILGEKIELLDIAKSFYDFMVLNNILSDSNYISEAKVKLYEEHKKDLKNLKYIIRKYNKENYDKLFKDKNENNYPAYIGLNKEKDKKEVVEKSRLKIDDLIKVIKGYLPKPERIEEKDKTIFNEILNKIELKTILPKQRISDNGTLPYQIHEVELEKILENQSKYYDFLNYEENGVSTKDKLLKTFKFRIPYYVGPLNSYHKDKGGNSWIVRKEEGKILPWNFEQKVDIEKSAEEFIKRMTNKCTYLNGEDVIPKDSFLYSEYIILNELNKVQVNDEFLNEENKRKIIDELFKENKKVSEKKFKEYLLVNQIANRTVELKGIKDSFNSNYVSYIKFKDIFGEKLNLDIYKEISEKSILWKCLYGDDKKIFEKKIKNEYGDILNKDEIKKINSFKFNTWGRLSEKLLTGIEFINLETGECYSSVMEALRRTNYNLMELLSSKFTLQESIDNENKEMNEVSYRDLIEESYVSPSLKRAILQTLKIYEEIKKITGRVPKKVFIEMARGGDESMKNKKIPARQEQLKKLYDSCGNDIANFSIDIKEMKNSLSSYDNNSLRQKKLYLYYLQFGKCMYTGREIDLDRLLQNNDTYDIDHIYPRSKVIKDDSFDNLVLVLKNENAEKSNEYPVKKEIQEKMKSFWRFLKEKNFISDEKYKRLTGKDDFELRGFMARQLVNVRQTTKEVGKILQQIEPEIKIVYSKAEIASSFREMFDFIKVRELNDTHHAKDAYLNIVAGNVYNTKFTEKPYRYLQEIKENYDVKKIYNYDIKNAWDKENSLEIVKKNMEKNTVNITRFIKEEKGELFNLNPIKKGETSNEIISIKPKLYDGKDNKLNEKYGYYTSLKAAYFIYVEHEKKNKKVKTFERITRIDSTLIKNEKNLIKYLVSQKKLLNPKIIKKIYKEQTLIIDSYPYTFTGVDSNKKVELKNKKQLYLEKKYEQILKNALKFVEDNQGETEENYKFIYLKKRNNNEKNETIDAVKERYNIEFNEMYDKFLEKLSSKDYKNYINNKLYTNFLNSKEKFKKLKLWEKSLILREFLKIFNKNTYGKYEIKDSQTKEKLFSFPEDTGRIRLGQSSLGNNKELLEESVTGLFVKKIKL

SEQ ID NO: 327 - protein, 1333 aa, Planococcus antarcticus
MKNYTIGLDIGVASVGWVCIDENYKILNYNNRHAFGVHEFESAESAAGRRLKRGMRRRYNRRKKRLQLLQSLFDSYITDSGFFSKTDSQHFWKNNNEFENRSLTEVLSSLRISSRKYPTIYHLRSDLIESNKKMDLRLVYLALHNLVKYRGHFLQEGNWSEAASAEGMDDQLLELVTRYAELENLSPLDLSESQWKAAETLLLNRNLTKTDQSKELTAMFGKEYEPFCKLVAGLGVSLHQLFPSSEQALAYKETKTKVQLSNENVEEVMELLLEEESALLEAVQPFYQQVVLYELLKGETYVAKAKVSAFKQYQKDMASLKNLLDKTFGEKVYRSYFISDKNSQREYQKSHKVEVLCKLDQFNKEAKFAETFYKDLKKLLEDKSKTSIGTTEKDEMLRIIKAIDSNQFLQKQKGIQNAAIPHQNSLYEAEKILRNQQAHYPFITTEWIEKVKQILAFRIPYYIGPLVKDTTQSPFSWVERKGDAPITPWNFDEQIDKAASAEAFISRMRKTCTYLKGQEVLPKSSLTYERFEVLNELNGIQLRTTGAESDFRHRLSYEMKCWIIDNVFKQYKTVSTKRLLQELKKSPYADELYDEHTGEIKEVFGTQKENAFATSLSGYISMKSILGAVVDDNPAMTEELIYWIAVFEDREILHLKIQEKYPSITDVQRQKLALVKLPGWGRFSRLLIDGLPLDEQGQSVLDHMEQYSSVFMEVLKNKGFGLEKKIQKMNQHQVDGTKKIRYEDIEELAGSPALKRGIWRSVKIVEELVSIFGEPANIVLEVAREDGEKKRTKSRKDQWEELTKTTLKNDPDLKSFIGEIKSQGDQRFNEQRFWLYVTQQGKCLYTGKALDIQNLSMYEVDHILPQNFVKDDSLDNLALVMPEANQRKNQVGQNKMPLEIIEANQQYAMRTLWERLHELKLISSGKLGRLKKPSFDEVDKDKFIARQLVETRQIIKHVRDLLDERFSKSDIHLVKAGIVSKFRRFSEIPKIRDYNNKHHAMDALFAAALIQSILGKYGKNFLAFDLSKKDRQKQWRSVKGSNKEFFLFKNFGNLRLQSPVTGEEVSGVEYMKHVYFELPWQTTKMTQTGDGMFYKESIFSPKVKQAKYVSPKTEKFVHDEVKNHSICLVEFTFMKKEKEVQETKFIDLKVIEHHQFLKEPESQLAKFLAEKETNSPIIHARIIRTIPKYQKIWIEHFPYYFISTRELHNARQFEISYELMEKVKQLSERSSVEELKIVFGLLIDQMNDNYPIYTKSSIQDRVQKFVDTQLYDFKSFEIGFEELKKAVAANAQRSDTFGSRISKKPKPEEVAIGYESITGLKYRKPRSVVGTKR

SEQ ID NO: 328 - protein, 1395 aa, Treponema denticola
MKKEIKDYFLGLDVGTGSVGWAVTDTDYKLLKANRKDLWGMRCFETAETAEVRRLHRGARRRIERRKKRIKLLQELFSQEIAKTDEGFFQRMKESPFYAEDKTILQENTLFNDKDFADKTYHKAYPTINHLIKAWIENKVKPDPRLLYLACHNIIKKRGHFLFEGDFDSENQFDTSIQALFEYLREDMEVDIDADSQKVKEILKDSSLKNSEKQSRLNKILGLKPSDKQKKAITNLISGNKINFADLYDNPDLKDAEKNSISFSKDDFDALSDDLASILGDSFELLLKAKAVYNCSVLSKVIGDEQYLSFAKVKIYEKHKTDLTKLKNVIKKHFPKDYKKVFGYNKNEKNNNNYSGYVGVCKTKSKKLIINNSVNQEDFYKFLKTILSAKSEIKEVNDILTEIETGTFLPKQISKSNAEIPYQLRKMELEKILSNAEKHFSFLKQKDEKGLSHSEKIIMLLTFKIPYYIGPINDNHKKFFPDRCWVVKKEKSPSGKTTPWNFFDHIDKEKTAEAFITSRTNFCTYLVGESVLPKSSLLYSEYTVLNEINNLQIIIDGKNICDIKLKQKIYEDLFKKYKKITQKQISTFIKHEGICNKTDEVIILGIDKECTSSLKSYIELKNIFGKQVDEISTKNMLEEIIRWATIYDEGEGKTILKTKIKAEYGKYCSDEQIKKILNLKFSGWGRLSRKFLETVTSEMPGFSEPVNIITAMRETQNNLMELLSSEFTFTENIKKINSGFEDAEKQFSYDGLVKPLFLSPSVKKMLWQTLKLVKEISHITQAPPKKIFIEMAKGAELEPARTKTRLKILQDLYNNCKNDADAFSSEIKDLSGKIENEDNLRLRSDKLYLYYTQLGKCMYCGKPIEIGHVFDTSNYDIDHIYPQSKIKDDSISNRVLVCSSCNKNKEDKYPLKSEIQSKQRGFWNFLQRNNFISLEKLNRLTRATPISDDETAKFIARQLVETRQATKVAAKVLEKMFPETKIVYSKAETVSMFRNKFDIVKCREINDFHHAHDAYLNIVVGNVYNTKFTNNPWNFIKEKRDNPKIADTYNYYKVFDYDVKRNNITAWEKGKTIITVKDMLKRNTPIYTRQAACKKGELFNQTIMKKGLGQHPLKKEGPFSNISKYGGYNKVSAAYYTLIEYEEKGNKIRSLETIPLYLVKDIQKDQDVLKSYLTDLLGKKEFKILVPKIKINSLLKINGFPCHITGKTNDSFLLRPAVQFCCSNNEVLYFKKIIRFSEIRSQREKIGKTISPYEDLSFRSYIKENLWKKTKNDEIGEKEFYDLLQKKNLEIYDMLLTKHKDTIYKKRPNSATIDILVKGKEKFKSLIIENQFEVILEILKLFSATRNVSDLQHIGGSKYSGVAKIGNKISSLDNCILIYQSITGIFEKRIDLLKV

SEQ ID NO: 329 - protein, 1327 aa, Solobacterium moorei
MEGQMKNNGNNLQQGNYYLGLDVGTSSVGWAVTDTDYNVLKFRGKSMWGARLFDEASTAEERRTHRGNRRRLARRKYRLLLLEQLFEKEIRKIDDNFFVRLHESNLWADDKSKPSKFLLFNDTNFTDKDYLKKYPTIYHLRSDLIHNSTEHDIRLVFLALHHLIKYRGHFIYDNSANGDVKTLDEAVSDFEEYLNENDIEFNIENKKEFINVLSDKHLTKKEKKISLKKLYGDITDSENINISVLIEMLSGSSISLSNLFKDIEFDGKQNLSLDSDIEETLNDVVDILGDNIDLLIHAKEVYDIAVLTSSLGKHKYLCDAKVELFEKNKKDLMILKKYIKKNHPEDYKKIFSSPTEKKNYAAYSQTNSKNVCSQEEFCLFIKPYIRDMVKSENEDEVRIAKEVEDKSFLTKLKGTNNSVVPYQIHERELNQILKNIVAYLPFMNDEQEDISVVDKIKLIFKFKIPYYVGPLNTKSTRSWVYRSDEKIYPWNFSNVIDLDKTAHEFMNRLIGRCTYTNDPVLPMDSLLYSKYNVLNEINPIKVNGKAIPVEVKQAIYTDLFENSKKKVTRKSIYIYLLKNGYIEKEDIVSGIDIEIKSKLKSHHDFTQIVQENKCTPEEIERIIKGILVYSDDKSMLRRWLKNNIKGLSENDVKYLAKLNYKEWGRLSKTLLTDIYTINPEDGEACSILDIMWNTNATLMEILSNEKYQFKQNIENYKAENYDEKQNLHEELDDMYISPAARRSIWQALRIVDEIVDIKKSAPKKIFIEMAREKKSAMKKKRTESRKDTLLELYKSCKSQADGFYDEELFEKLSNESNSRLRRDQLYLYYTQMGRSMYTGKRIDFDKLINDKNTYDIDHIYPRSKIKDDSITNRVLVEKDINGEKTDIYPISEDIRQKMQPFWKILKEKGLINEEKYKRLTRNYELTDEELSSFVARQLVETQQSTKALATLLKKEYPSAKIVYSKAGNVSEFRNRKDKELPKFREINDLHHAKDAYLNIVVGNVYDTKFTEKFFNNIRNENYSLKRVFDFSVPGAWDAKGSTFNTIKKYMAKNNPIIAFAPYEVKGELFDQQIVPKGKGQFPIKQGKDIEKYGGYNKLSSAFLFAVEYKGKKARERSLETVYIKDVELYLQDPIKYCESVLGLKEPQIIKPKILMGSLFSINNKKLVVTGRSGKQYVCHHIYQLSINDEDSQYLKNIAKYLQEEPDGNIERQNILNITSVNNIKLFDVLCTKFNSNTYEIILNSLKNDVNEGREKFSELDILEQCNILLQLLKAFKCNRESSNLEKLNNKKQAGVIVIPHLFTKCSVFKVIHQSITGLFEKEMDLLK

SEQ ID NO: 330 - protein, 1334 aa, Staphylococcus pseudintermedius
MGRKPYILSLDIGTGSVGYACMDKGFNVLKYHDKDALGVYLFDGALTAQERRQFRTSRRRKNRRIKRLGLLQELLAPLVQNPNFYQFQRQFAWKNDNMDFKNKSLSEVLSFLGYESKKYPTIYHLQEALLLKDEKFDPELIYMALYHLVKYRGHFLFDHLKIENLTNNDNMHDFVELIETYENLNNIKLNLDYEKTKVIYEILKDNEMTKNDRAKRVKNMEKKLEQFSIMLLGLKFNEGKLFNHADNAEELKGANQSHTFADNYEENLTPFLTVEQSEFIERANKIYLSLTLQDILKGKKSMAMSKVAAYDKFRNELKQVKDIVYKADSTRTQFKKIFVSSKKSLKQYDATPNDQTFSSLCLFDQYLIRPKKQYSLLIKELKKIIPQDSELYFEAENDTLLKVLNTTDNASIPMQINLYEAETILRNQQKYHAEITDEMIEKVLSLIQFRIPYYVGPLVNDHTASKFGWMERKSNESIKPWNFDEVVDRSKSATQFIRRMTNKCSYLINEDVLPKNSLLYQEMEVLNELNATQIRLQTDPKNRKYRMMPQIKLFAVEHIFKKYKTVSHSKFLEIMLNSNHRENFMNHGEKLSIFGTQDDKKFASKLSSYQDMTKIFGDIEGKRAQIEEIIQWITIFEDKKILVQKLKECYPELTSKQINQLKKLNYSGWGRLSEKLLTHAYQGHSIIELLRHSDENFMEILTNDVYGFQNFIKEENQVQSNKIQHQDIANLTTSPALKKGIWSTIKLVRELTSIFGEPEKIIMEFATEDQQKGKKQKSRKQLWDDNIKKNKLKSVDEYKYIIDVANKLNNEQLQQEKLWLYLSQNGKCMYSGQSIDLDALLSPNATKHYEVDHIFPRSFIKDDSIDNKVLVIKKMNQTKGDQVPLQFIQQPYERIAYWKSLNKAGLISDSKLHKLMKPEFTAMDKEGFIQRQLVETRQISVHVRDFLKEEYPNTKVIPMKAKMVSEFRKKFDIPKIRQMNDAHHAIDAYLNGVVYHGAQLAYPNVDLFDFNFKWEKVREKWKALGEFNTKQKSRELFFFKKLEKMEVSQGERLISKIKLDMNHFKINYSRKLANIPQQFYNQTAVSPKTAELKYESNKSNEVVYKGLTPYQTYVVAIKSVNKKGKEKMEYQMIDHYVFDFYKFQNGNEKELALYLAQRENKDEVLDAQIVYSLNKGDLLYINNHPCYFVSRKEVINAKQFELTVEQQLSLYNVMNNKETNVEKLLIEYDFIAEKVINEYHHYLNSKLKEKRVRTFFSESNQTHEDFIKALDELFKVVTASATRSDKIGSRKNSMTHRAFLGKGKDVKIAYTSISGLKTTKPKSLFKLAESRNEL

SEQ ID NO: 331 - protein, 1472 aa, Flavobacterium branchiophilum
MAKILGLDLGTNSIGWAVVERENIDFSLIDKGVRIFSEGVKSEKGIESSRAAERTGYRSARKIKYRRKLRKYETLKVLSLNRMCPLSIEEVEEWKKSGFKDYPLNPEFLKWLSTDEESNVNPYFFRDRASKHKVSLFELGRAFYHIAQRRGFLSNRLDQSAEGILEEHCPKIEAIVEDLISIDEISTNITDYFFETGILDSNEKNGYAKDLDEGDKKLVSLYKSLLAILKKNESDFENCKSEIIERLNKKDVLGKVKGKIKDISQAMLDGNYKTLGQYFYSLYSKEKIRNQYTSREEHYLSEFITICKVQGIDQINEEEKINEKKFDGLAKDLYKAIFFQRPLKSQKGLIGKCSFEKSKSRCAISHPDFEEYRMWTYLNTIKIGTQSDKKLRFLTQDEKLKLVPKFYRKNDFNFDVLAKELIEKGSSFGFYKSSKKNDFFYWFNYKPTDTVAACQVAASLKNAIGEDWKTKSFKYQTINSNKEQVSRTVDYKDLWHLLTVATSDVYLYEFAIDKLGLDEKNAKAFSKTKLKKDFASLSLSAINKILPYLKEGLLYSHAVFVANIENIVDENIWKDEKQRDYIKTQISEIIENYTLEKSRFEIINGLLKEYKSENEDGKRVYYSKEAEQSFENDLKKKLVLFYKSNEIENKEQQETIFNELLPIFIQQLKDYEFIKIQRLDQKVLIFLKGKNETGQIFCTEEKGTAEEKEKKIKNRLKKLYHPSDIEKFKKKIIKDEFGNEKIVLGSPLTPSIKNPMAMRALHQLRKVLNALILEGQIDEKTIIHIEMARELNDANKRKGIQDYQNDNKKFREDAIKEIKKLYFEDCKKEVEPTEDDILRYQLWMEQNRSEIYEEGKNISICDIIGSNPAYDIEHTIPRSRSQDNSQMNKTLCSQRFNREVKKQSMPIELNNHLEILPRIAHWKEEADNLTREIEIISRSIKAAATKEIKDKKIRRRHYLTLKRDYLQGKYDRFIWEEPKVGFKNSQIPDTGIITKYAQAYLKSYFKKVESVKGGMVAEFRKIWGIQESFIDENGMKHYKVKDRSKHTHHTIDAITIACMTKEKYDVLAHAWTLEDQQNKKEARSIIEASKPWKTFKEDLLKIEEEILVSHYTPDNVKKQAKKIVRVRGKKQFVAEVERDVNGKAVPKKAASGKTIYKLDGEGKKLPRLQQGDTIRGSLHQDSIYGAIKNPLNTDEIKYVIRKDLESIKGSDVESIVDEVVKEKIKEAIANKVLLLSSNAQQKNKLVGTVWMNEEKRIAINKVRIYANSVKNPLHIKEHSLLSKSKHVHKQKVYGQNDENYAMAIYELDGKRDFELINIFNLAKLIKQGQGFYPLHKKKEIKGKIVFVPIEKRNKRDVVLKRGQQVVFYDKEVENPKDISEIVDFKGRIYIIEGLSIQRIVRPSGKVDEYGVIMLRYFKEARKADDIKQDNFKPDGVFKLGENKPTRKMNHQFTAFVEGIDFKVLPSGKFEKI

SEQ ID NO: 332 - protein, 1688 aa, Ignavibacterium album
MEFKKVLGLDIGTNSIGCALLSLPKSIQDYGKGGRLEWLTSRVIPLDADYMKAFIDGKNGLPQVITPAGKRRQKRGSRRLKHRYKLRRSRLIRVFKTLNWLPEDFPLDNPKRIKETISTEGKFSFRISDYVPISDESYREFYREFGYPENEIEQVIEEINFRRKTKGKNKNPMIKLLPEDWVVYYLRKKALIKPTTKEELIRIIYLFNQRRGFKSSRKDLTETAILDYDEFAKRLAEKEKYSAENYETKFVSITKVKEVVELKTDGRKGKKRFKVILEDSRIEPYEIERKEKPDWEGKEYTFLVTQKLEKGKFKQNKPDLPKEEDWALCTTALDNRMGSKHPGEFFFDELLKAFKEKRGYKIRQYPVNRWRYKKELEFIWTKQCQLNPELNNLNINKEILRKLATVLYPSQSKFFGPKIKEFENSDVLHIISEDIIYYQRDLKSQKSLISECRYEKRKGIDGEIYGLKCIPKSSPLYQEFRIWQDIHNIKVIRKESEVNGKKKINIDETQLYINENIKEKLFELFNSKDSLSEKDILELISLNIINSGIKISKKEEETTHRINLFANRKELKGNETKSRYRKVFKKLGFDGEYILNHPSKLNRLWHSDYSNDYADKEKTEKSILSSLGWKNRNGKWEKSKNYDVFNLPLEVAKAIANLPPLKKEYGSYSALAIRKMLVVMRDGKYWQHPDQIAKDQENTSLMLFDKNLIQLTNNQRKVLNKYLLTLAEVQKRSTLIKQKLNEIEHNPYKLELVSDQDLEKQVLKSFLEKKNESDYLKGLKTYQAGYLIYGKHSEKDVPIVNSPDELGEYIRKKLPNNSLRNPIVEQVIRETIFIVRDVWKSFGIIDEIHIELGRELKNNSEERKKTSESQEKNFQEKERARKLLKELLNSSNFEHYDENGNKIFSSFTVNPNPDSPLDIEKFRIWKNQSGLTDEELNKKLKDEKIPTEIEVKKYILWLTQKCRSPYTGKIIPLSKLFDSNVYEIEHIIPRSKMKNDSTNNLVICELGVNKAKGDRLAANFISESNGKCKFGEVEYTLLKYGDYLQYCKDTFKYQKAKYKNLLATEPPEDFIERQINDTRYIGRKLAELLTPVVKDSKNIIFTIGSITSELKITWGLNGVWKDILRPRFKRLESIINKKLIFQDEDDPNKYHFDLSINPQLDKEGLKRLDHRHHALDATIIAATTREHVRYLNSLNAADNDEEKREYFLSLCNHKIRDFKLPWENFTSEVKSKLLSCVVSYKESKPILSDPFNKYLKWEYKNGKWQKVFAIQIKNDRWKAVRRSMFKEPIGTVWIKKIKEVSLKEAIKIQAIWEEVKNDPVRKKKEKYIYDDYAQKVIAKIVQELGLSSSMRKQDDEKLNKFINEAKVSAGVNKNLNTTNKTIYNLEGRFYEKIKVAEYVLYKAKRMPLNKKEYIEKLSLQKMFNDLPNFILEKSILDNYPEILKELESDNKYIIEPHKKNNPVNRLLLEHILEYHNNPKEAFSTEGLEKLNKKAINKIGKPIKYITRLDGDINEEEIFRGAVFETDKGSNVYFVMYENNQTKDREFLKPNPSISVLKAIEHKNKIDFFAPNRLGFSRIILSPGDLVYVPTNDQYVLIKDNSSNETIINWDDNEFISNRIYQVKKFTGNSCYFLKNDIASLILSYSASNGVGEFGSQNISEYSVDDPPIRIKDVCIKIRVDRLGNVRPL

SEQ ID NO: 333 - protein, 1415 aa, Bergeyella zoohelcum
MKHILGLDLGTNSIGWALIERNIEEKYGKIIGMGSRIVPMGAELSKFEQGQAQTKNADRRTNRGARRLNKRYKQRRNKLIYILQKLDMLPSQIKLKEDFSDPNKIDKITILPISKKQEQLTAFDLVSLRVKALTEKVGLEDLGKIIYKYNQLRGYAGGSLEPEKEDIFDEEQSKDKKNKSFIAFSKIVFLGEPQEEIFKNKKLNRRAIIVETEEGNFEGSTFLENIKVGDSLELLINISASKSGDTITIKLPNKTNWRKKMENIENQLKEKSKEMGREFYISEFLLELLKENRWAKIRNNTILRARYESEFEAIWNEQVKHYPFLENLDKKTLIEIVSFIFPGEKESQKKYRELGLEKGLKYIIKNQVVFYQRELKDQSHLISDCRYEPNEKAIAKSHPVFQEYKVWEQINKLIVNTKIEAGTNRKGEKKYKYIDRPIPTALKEWIFEELQNKKEITFSAIFKKLKAEFDLREGIDFLNGMSPKDKLKGNETKLQLQKSLGELWDVLGLDSINRQIELWNILYNEKGNEYDLTSDRTSKVLEFINKYGNNIVDDNAEETAIRISKIKFARAYSSLSLKAVERILPLVRAGKYFNNDFSQQLQSKILKLLNENVEDPFAKAAQTYLDNNQSVLSEGGVGNSIATILVYDKHTAKEYSHDELYKSYKEINLLKQGDLRNPLVEQIINEALVLIRDIWKNYGIKPNEIRVELARDLKNSAKERATIHKRNKDNQTINNKIKETLVKNKKELSLANIEKVKLWEAQRHLSPYTGQPIPLSDLFDKEKYDVDHIIPISRYFDDSFTNKVISEKSVNQEKANRTAMEYFEVGSLKYSIFTKEQFIAHVNEYFSGVKRKNLLATSIPEDPVQRQIKDTQYIAIRVKEELNKIVGNENVKTTTGSITDYLRNHWGLTDKFKLLLKERYEALLESEKFLEAEYDNYKKDFDSRKKEYEEKEVLFEEQELTREEFIKEYKENYIRYKKNKLIIKGWSKRIDHRHHAIDALIVACTEPAHIKRLNDLNKVLQDWLVEHKSEFMPNFEGSNSELLEEILSLPENERTEIFTQIEKFRAIEMPWKGFPEQVEQKLKEIIISHKPKDKLLLQYNKAGDRQIKLRGQLHEGTLYGISQGKEAYRIPLTKFGGSKFATEKNIQKIVSPFLSGFIANHLKEYNNKKEEAFSAEGIMDLNNKLAQYRNEKGELKPHTPISTVKIYYKDPSKNKKKKDEEDLSLQKLDREKAFNEKLYVKTGDNYLFAVLEGEIKTKKTSQIKRLYDIISFFDATNFLKEEFRNAPDKKTFDKDLLFRQYFEERNKAKLLFTLKQGDFVYLPNENEEVILDKESPLYNQYWGDLKERGKNIYVVQKFSKKQIYFIKHTIADIIKKDVEFGSQNCYETVEGRSIKENCFKLEIDRLGNIVKVIKR

SEQ ID NO: 334 - protein, 1166 aa, Nitrobacter hamburgensis
MHVEIDFPHFSRGDSHLAMNKNEILRGSSVLYRLGLDLGSNSLGWFVTHLEKRGDRHEPVALGPGGVRIFPDGRDPQSGTSNAVDRRMARGARKRRDRFVERRKELIAALIKYNLLPDDARERRALEVLDPYALRKTALTDTLPAHHVGRALFHLNQRRGFQSNRKTDSKQSEDGAIKQAASRLATDKGNETLGVFFADMHLRKSYEDRQTAIRAELVRLGKDHLTGNARKKIWAKVRKRLFGDEVLPRADAPHGVRARATITGTKASYDYYPTRDMLRDEFNAIWAGQSAHHATITDEARTEIEHIIFYQRPLKPAIVGKCTLDPATRPFKEDPEGYRAPWSHPLAQRFRILSEARNLEIRDTGKGSRRLTKEQSDLVVAALLANREVKFDKLRTLLKLPAEARFNLESDRRAALDGDQTAARLSDKKGFNKAWRGFPPERQIAIVARLEETEDENELIAWLEKECALDGAAAARVANTTLPDGHCRLGLRAIKKIVPIMQDGLDEDGVAGAGYHIAAKRAGYDHAKLPTGEQLGRLPYYGQWLQDAVVGSGDARDQKEKQYGQFPNPTVHIGLGQLRRVVNDLIDKYGPPTEISIEFTRALKLSEQQKAERQREQRRNQDKNKARAEELAKFGRPANPRNLLKMRLWEELAHDPLDRKCVYTGEQISIERLLSDEVDIDHILPVAMTLDDSPANKIICMRYANRHKRKQTPSEAFGSSPTLQGHRYNWDDIAARATGLPRNKRWRFDANAREEFDKRGGFLARQLNETGWLARLAKQYLGAVTDPNQIWVVPGRLTSMLRGKWGLNGLLPSDNYAGVQDKAEEFLASTDDMEFSGVKNRADHRHHAIDGLVTALTDRSLLWKMANAYDEEHEKFVIEPPWPTMRDDLKAALEKMVVSHKPDHGIEGKLHEDSAYGFVKPLDATGLKEEEAGNLVYRKAIESLNENEVDRIRDIQLRTIVRDHVNVEKTKGVALADALRQLQAPSDDYPQFKHGLRHVRILKKEKGDYLVPIANRASGVAYKAYSAGENFCVEVFETAGGKWDGEAVRRFDANKKNAGPKIAHAPQWRDANEGAKLVMRIHKGDLIRLDHEGRARIMVVHRLDAAAGRFKLADHNETGNLDKRHATNNDIDPFRWLMASYNTLKKLAAVPVRVDELGRVWRVMPN

SEQ ID NO: 335 - protein, 1498 aa, Odoribacter laneus
METTLGIDLGTNSIGLALVDQEEHQILYSGVRIFPEGINKDTIGLGEKEESRNATRRAKRQMRRQYFRKKLRKAKLLELLIAYDMCPLKPEDVRRWKNWDKQQKSTVRQFPDTPAFREWLKQNPYELRKQAVTEDVTRPELGRILYQMIQRRGFLSSRKGKEEGKIFTGKDRMVGIDETRKNLQKQTLGAYLYDIAPKNGEKYRFRTERVRARYTLRDMYIREFEIIWQRQAGHLGLAHEQATRKKNIFLEGSATNVRNSKLITHLQAKYGRGHVLIEDTRITVTFQLPLKEVLGGKIEIEEEQLKFKSNESVLFWQRPLRSQKSLLSKCVFEGRNFYDPVHQKWIIAGPTPAPLSHPEFEEFRAYQFINNIIYGKNEHLTAIQREAVFELMCTESKDFNFEKIPKHLKLFEKFNFDDTTKVPACTTISQLRKLFPHPVWEEKREEIWHCFYFYDDNTLLFEKLQKDYALQTNDLEKIKKIRLSESYGNVSLKAIRRINPYLKKGYAYSTAVLLGGIRNSFGKRFEYFKEYEPEIEKAVCRILKEKNAEGEVIRKIKDYLVHNRFGFAKNDRAFQKLYHHSQAITTQAQKERLPETGNLRNPIVQQGLNELRRTVNKLLATCREKYGPSFKFDHIHVEMGRELRSSKTEREKQSRQIRENEKKNEAAKVKLAEYGLKAYRDNIQKYLLYKEIEEKGGTVCCPYTGKTLNISHTLGSDNSVQIEHIIPYSISLDDSLANKTLCDATFNREKGELTPYDFYQKDPSPEKWGASSWEEIEDRAFRLLPYAKAQRFIRRKPQESNEFISRQLNDTRYISKKAVEYLSAICSDVKAFPGQLTAELRHLWGLNNILQSAPDITFPLPVSATENHREYYVITNEQNEVIRLFPKQGETPRTEKGELLLTGEVERKVFRCKGMQEFQTDVSDGKYWRRIKLSSSVTWSPLFAPKPISADGQIVLKGRIEKGVFVCNQLKQKLKTGLPDGSYWISLPVISQTFKEGESVNNSKLTSQQVQLFGRVREGIFRCHNYQCPASGADGNFWCTLDTDTAQPAFTPIKNAPPGVGGGQIILTGDVDDKGIFHADDDLHYELPASLPKGKYYGIFTVESCDPTLIPIELSAPKTSKGENLIEGNIWVDEHTGEVRFDPKKNREDQRHHAIDAIVIALSSQSLFQRLSTYNARRENKKRGLDSTEHFPSPWPGFAQDVRQSVVPLLVSYKQNPKTLCKISKTLYKDGKKIHSCGNAVRGQLHKETVYGQRTAPGATEKSYHIRKDIRELKTSKHIGKVVDITIRQMLLKHLQENYHIDITQEFNIPSNAFFKEGVYRIFLPNKHGEPVPIKKIRMKEELGNAERLKDNINQYVNPRNNHHVMIYQDADGNLKEEIVSFWSVIERQNQGQPIYQLPREGRNIVSILQINDTFLIGLKEEEPEVYRNDLSTLSKHLYRVQKLSGMYYTFRHHLASTLNNEREEFRIQSLEAWKRANPVKVQIDEIGRITFLNGPLC

SEQ ID NO: 336 - protein, 1372 aa, Legionella pneumophila
MESSQILSPIGIDLGGKFTGVCLSHLEAFAELPNHANTKYSVILIDHNNFQLSQAQRRATRHRVRNKKRNQFVKRVALQLFQHILSRDLNAKEETALCHYLNNRGYTYVDTDLDEYIKDETTINLLKELLPSESEHNFIDWFLQKMQSSEFRKILVSKVEEKKDDKELKNAVKNIKNFITGFEKNSVEGHRHRKVYFENIKSDITKDNQLDSIKKKIPSVCLSNLLGHLSNLQWKNLHRYLAKNPKQFDEQTFGNEFLRMLKNFRHLKGSQESLAVRNLIQQLEQSQDYISILEKTPPEITIPPYEARTNTGMEKDQSLLLNPEKLNNLYPNWRNLIPGIIDAHPFLEKDLEHTKLRDRKRIISPSKQDEKRDSYILQRYLDLNKKIDKFKIKKQLSFLGQGKQLPANLIETQKEMETHFNSSLVSVLIQIASAYNKEREDAAQGIWFDNAFSLCELSNINPPRKQKILPLLVGAILSEDFINNKDKWAKFKIFWNTHKIGRTSLKSKCKEIEEARKNSGNAFKIDYEEALNHPEHSNNKALIKIIQTIPDIIQAIQSHLGHNDSQALIYHNPFSLSQLYTILETKRDGFHKNCVAVTCENYWRSQKTEIDPEISYASRLPADSVRPFDGVLARMMQRLAYEIAMAKWEQIKHIPDNSSLLIPIYLEQNRFEFEESFKKIKGSSSDKTLEQAIEKQNIQWEEKFQRIINASMNICPYKGASIGGQGEIDHIYPRSLSKKHFGVIFNSEVNLIYCSSQGNREKKEEHYLLEHLSPLYLKHQFGTDNVSDIKNFISQNVANIKKYISFHLLTPEQQKAARHALFLDYDDEAFKTITKFLMSQQKARVNGTQKFLGKQIMEFLSTLADSKQLQLEFSIKQITAEEVHDHRELLSKQEPKLVKSRQQSFPSHAIDATLTMSIGLKEFPQFSQELDNSWFINHLMPDEVHLNPVRSKEKYNKPNISSTPLFKDSLYAERFIPVWVKGETFAIGFSEKDLFEIKPSNKEKLFTLLKTYSTKNPGESLQELQAKSKAKWLYFPINKTLALEFLHHYFHKEIVTPDDTTVCHFINSLRYYTKKESITVKILKEPMPVLSVKFESSKKNVLGSFKHTIALPATKDWERLFNHPNFLALKANPAPNPKEFNEFIRKYFLSDNNPNSDIPNNGHNIKPQKHKAVRKVFSLPVIPGNAGTMMRIRRKDNKGQPLYQLQTIDDTPSMGIQINEDRLVKQEVLMDAYKTRNLSTIDGINNSEGQAYATFDNWLTLPVSTFKPEIIKLEMKPHSKTRRYIRITQSLADFIKTIDEALMIKPSDSIDDPLNMPNEIVCKNKLFGNELKPRDGKMKIVSTGKIVTYEFESDSTPQWIQTLYVTQLKKQP

SEQ ID NO: 337 - protein, 1517 aa, Bacteroides sp.
MKKIVGLDLGTNSIGWALINAYINKEHLYGIEACGSRIIPMDAAILGNFDKGNSISQTADRTSYRGIRRLRERHLLRRERLHRILDLLGFLPKHYSDSLNRYGKFLNDIECKLPWVKDETGSYKFIFQESFKEMLANFTEHHPILIANNKKVPYDWTIYYLRKKALTQKISKEELAWILLNFNQKRGYYQLRGEEEETPNKLVEYYSLKVEKVEDSGERKGKDTWYNVHLENGMIYRRTSNIPLDWEGKTKEFIVTTDLEADGSPKKDKEGNIKRSFRAPKDDDWTLIKKKTEADIDKIKMTVGAYIYDTLLQKPDQKIRGKLVRTIERKYYKNELYQILKTQSEFHEELRDKQLYIACLNELYPNNEPRRNSISTRDFCHLFIEDIIFYQRPLKSKKSLIDNCPYEENRYIDKESGEIKHASIKCIAKSHPLYQEFRLWQFIVNLRIYRKETDVDVTQELLPTEADYVTLFEWLNEKKEIDQKAFFKYPPFGFKKTTSNYRWNYVEDKPYPCNETHAQIIARLGKAHIPKAFLSKEKEETLWHILYSIEDKQEIEKALHSFANKNNLSEEFIEQFKNFPPFKKEYGSYSAKAIKKLLPLMRMGKYWSIENIDNGTRIRINKIIDGEYDENIRERVRQKAINLTDITHFRALPLWLACYLVYDRHSEVKDIVKWKTPKDIDLYLKSFKQHSLRNPIVEQVITETLRTVRDIWQQVGHIDEIHIELGREMKNPADKRARMSQQMIKNENTNLRIKALLTEFLNPEFGIENVRPYSPSQQDLLRIYEEGVLNSILELPEDIGIILGKFNQTDTLKRPTRSEILRYKLWLEQKYRSPYTGEMIPLSKLFTPAYEIEHIIPQSRYFDDSLSNKVICESEINKLKDRSLGYEFIKNHHGEKVELAFDKPVEVLSVEAYEKLVHESYSHNRSKMKKLLMEDIPDQFIERQLNDSRYISKVVKSLLSNIVREENEQEAISKNVIPCTGGITDRLKKDWGINDVWNKIVLPRFIRLNELTESTRFTSINTNNTMIPSMPLELQKGFNKKRIDHRHHAMDAIIIACANRNIVNYLNNVSASKNTKITRRDLQTLLCHKDKTDNNGNYKWVIDKPWETFTQDTLTALQKITVSFKQNLRVINKTTNHYQHYENGKKIVSNQSKGDSWAIRKSMHKETVHGEVNLRMIKTVSFNEALKKPQAIVEMDLKKKILAMLELGYDTKRIKNYFEENKDTWQDINPSKIKVYYFTKETKDRYFAVRKPIDTSFDKKKIKESITDTGIQQIMLRHLETKDNDPTLAFSPDGIDEMNRNILILNKGKKHQPIYKVRVYEKAEKFTVGQKGNKRTKFVEAAKGTNLFFAIYETEEIDKDTKKVIRKRSYSTIPLNVVIERQKQGLSSAPEDENGNLPKYILSPNDLVYVPTQEEINKGEVVMPIDRDRIYKMVDSSGITANFIPASTANLIFALPKATAEIYCNGENCIQNEYGIGSPQSKNQKAITGEMVKEICFPIKVDRLGNIIQVGSCILTN

SEQ ID NO: 338 - protein, 1101 aa, Akkermansia muciniphila
MSRSLTFSFDIGYASIGWAVIASASHDDADPSVCGCGTVLFPKDDCQAFKRREYRRLRRNIRSRRVRIERIGRLLVQAQIITPEMKETSGHPAPFYLASEALKGHRTLAPIELWHVLRWYAHNRGYDNNASWSNSLSEDGGNGEDTERVKHAQDLMDKHGTATMAETICRELKLEEGKADAPMEVSTPAYKNLNTAFPRLIVEKEVRRILELSAPLIPGLTAEIIELIAQHHPLTTEQRGVLLQHGIKLARRYRGSLLFGQLIPRFDNRIISRCPVTWAQVYEAELKKGNSEQSARERAEKLSKVPTANCPEFYEYRMARILCNIRADGEPLSAEIRRELMNQARQEGKLTKASLEKAISSRLGKETETNVSNYFTLHPDSEEALYLNPAVEVLQRSGIGQILSPSVYRIAANRLRRGKSVTPNYLLNLLKSRGESGEALEKKIEKESKKKEADYADTPLKPKYATGRAPYARTVLKKVVEEILDGEDPTRPARGEAHPDGELKAHDGCLYCLLDTDSSVNQHQKERRLDTMTNNHLVRHRMLILDRLLKDLIQDFADGQKDRISRVCVEVGKELTTFSAMDSKKIQRELTLRQKSHTDAVNRLKRKLPGKALSANLIRKCRIAMDMNWTCPFTGATYGDHELENLELEHIVPHSFRQSNALSSLVLTWPGVNRMKGQRTGYDFVEQEQENPVPDKPNLHICSLNNYRELVEKLDDKKGHEDDRRRKKKRKALLMVRGLSHKHQSQNHEAMKEIGMTEGMMTQSSHLMKLACKSIKTSLPDAHIDMIPGAVTAEVRKAWDVFGVFKELCPEAADPDSGKILKENLRSLTHLHHALDACVLGLIPYIIPAHHNGLLRRVLAMRRIPEKLIPQVRPVANQRHYVLNDDGRMMLRDLSASLKENIREQLMEQRVIQHVPADMGGALLKETMQRVLSVDGSGEDAMVSLSKKKDGKKEKNQVKASKLVGVFPEGPSKLKALKAAIEIDGNYGVALDPKPVVIRHIKVFKRIMALKEQNGGKPVRILKKGMLIHLTSSKDPKHAGVWRIESIQDSKGGVKLDLQRAHCAVPKNKTHECNWREVDLISLLKKYQMKRYPTSYTGTPR

SEQ ID NO: 339 - protein, 1424 aa, Prevotella sp.
MTQKVLGLDLGTNSIGSAVRNLDLSDDLQWQLEFFSSDIFRSSVNKESNGREYSLAAQRSAHRRSRGLNEVRRRRLWATLNLLIKHGFCPMSSESLMRWCTYDKRKGLFREYPIDDKDFNAWILLDFNGDGRPDYSSPYQLRRELVTRQFDFEQPIERYKLGRALYHIAQHRGFKSSKGETLSQQETNSKPSSTDEIPDVAGAMKASEEKLSKGLSTYMKEHNLLTVGAAFAQLEDEGVRVRNNNDYRAIRSQFQHEIETIFKFQQGLSVESELYERLISEKKNVGTIFYKRPLRSQRGNVGKCTLERSKPRCAIGHPLFEKFRAWTLINNIKVRMSVDTLDEQLPMKLRLDLYNECFLAFVRTEFKFEDIRKYLEKRLGIHFSYNDKTINYKDSTSVAGCPITARFRKMLGEEWESFRVEGQKERQAHSKNNISFHRVSYSIEDIWHFCYDAEEPEAVLAFAQETLRLERKKAEELVRIWSAMPQGYAMLSQKAIRNINKILMLGLKYSDAVILAKVPELVDVSDEELLSIAKDYYLVEAQVNYDKRINSIVNGLIAKYKSVSEEYRFADHNYEYLLDESDEKDIIRQIENSLGARRWSLMDANEQTDILQKVRDRYQDFFRSHERKFVESPKLGESFENYLTKKFPMVEREQWKKLYHPSQITIYRPVSVGKDRSVLRLGNPDIGAIKNPTVLRVLNTLRRRVNQLLDDGVISPDETRVVVETARELNDANRKWALDTYNRIRHDENEKIKKILEEFYPKRDGISTDDIDKARYVIDQREVDYFTGSKTYNKDIKKYKFWLEQGGQCMYTGRTINLSNLFDPNAFDIEHTIPESLSFDSSDMNLTLCDAHYNRFIKKNHIPTDMPNYDKAITIDGKEYPAITSQLQRWVERVERLNRNVEYWKGQARRAQNKDRKDQCMREMHLWKMELEYWKKKLERFTVTEVTDGFKNSQLVDTRVITRHAVLYLKSIFPHVDVQRGDVTAKFRKILGIQSVDEKKDRSLHSHHAIDATTLTIIPVSAKRDRMLELFAKIEEINKMLSFSGSEDRTGLIQELEGLKNKLQMEVKVCRIGHNVSEIGTFINDNIIVNHHIKNQALTPVRRRLRKKGYIVGGVDNPRWQTGDALRGEIHKASYYGAITQFAKDDEGKVLMKEGRPQVNPTIKFVIRRELKYKKSAADSGFASWDDLGKAIVDKELFALMKGQFPAETSFKDACEQGIYMIKKGKNGMPDIKLHHIRHVRCEAPQSGLKIKEQTYKSEKEYKRYFYAAVGDLYAMCCYTNGKIREFRIYSLYDVSCHRKSDIEDIPEFITDKKGNRLMLDYKLRTGDMILLYKDNPAELYDLDNVNLSRRLYKINRFESQSNLVLMTHHLSTSKERGRSLGKTVDYQNLPESIRSSVKSLNFLIMGENRDFVIKNGKIIFNHR

SEQ ID NO: 340 - protein, 1409 aa, Wolinella succinogenes
MLVSPISVDLGGKNTGFFSFTDSLDNSQSGTVIYDESFVLSQVGRRSKRHSKRNNLRNKLVKRLFLLILQEHHGLSIDVLPDEIRGLFNKRGYTYAGFELDEKKKDALESDTLKEFLSEKLQSIDRDSDVEDFLNQIASNAESFKDYKKGFEAVFASATHSPNKKLELKDELKSEYGENAKELLAGLRVTKEILDEFDKQENQGNLPRAKYFEELGEYIATNEKVKSFFDSNSLKLTDMTKLIGNISNYQLKELRRYFNDKEMEKGDIWIPNKLHKITERFVRSWHPKNDADRQRRAELMKDLKSKEIMELLTTTEPVMTIPPYDDMNNRGAVKCQTLRLNEEYLDKHLPNWRDIAKRLNHGKFNDDLADSTVKGYSEDSTLLHRLLDTSKEIDIYELRGKKPNELLVKTLGQSDANRLYGFAQNYYELIRQKVRAGIWVPVKNKDDSLNLEDNSNMLKRCNHNPPHKKNQIHNLVAGILGVKLDEAKFAEFEKELWSAKVGNKKLSAYCKNIEELRKTHGNTFKIDIEELRKKDPAELSKEEKAKLRLTDDVILNEWSQKIANFFDIDDKHRQRFNNLFSMAQLHTVIDTPRSGFSSTCKRCTAENRFRSETAFYNDETGEFHKKATATCQRLPADTQRPFSGKIERYIDKLGYELAKIKAKELEGMEAKEIKVPIILEQNAFEYEESLRKSKTGSNDRVINSKKDRDGKKLAKAKENAEDRLKDKDKRIKAFSSGICPYCGDTIGDDGEIDHILPRSHTLKIYGTVFNPEGNLIYVHQKCNQAKADSIYKLSDIKAGVSAQWIEEQVANIKGYKTFSVLSAEQQKAFRYALFLQNDNEAYKKVVDWLRTDQSARVNGTQKYLAKKIQEKLTKMLPNKHLSFEFILADATEVSELRRQYARQNPLLAKAEKQAPSSHAIDAVMAFVARYQKVFKDGTPPNADEVAKLAMLDSWNPASNEPLTKGLSTNQKIEKMIKSGDYGQKNMREVFGKSIFGENAIGERYKPIVVQEGGYYIGYPATVKKGYELKNCKVVTSKNDIAKLEKIIKNQDLISLKENQYIKIFSINKQTISELSNRYFNMNYKNLVERDKEIVGLLEFIVENCRYYTKKVDVKFAPKYIHETKYPFYDDWRRFDEAWRYLQENQNKTSSKDRFVIDKSSLNEYYQPDKNEYKLDVDTQPIWDDFCRWYFLDRYKTANDKKSIRIKARKTFSLLAESGVQGKVFRAKRKIPTGYAYQALPMDNNVIAGDYANILLEANSKTLSLVPKSGISIEKQLDKKLDVIKKTDVRGLAIDNNSFFNADFDTHGIRLIVENTSVKVGNFPISAIDKSAKRMIFRALFEKEKGKRKKKTTISFKESGPVQDYLKVFLKKIVKIQLRTDGSISNIVVRKNAADFTLSFRSEHIQKLLK

SEQ ID NO: 341 - protein, 1146 aa, Alicyclobacillus hesperidum
MAYRLGLDIGITSVGWAVVALEKDESGLKPVRIQDLGVRIFDKAEDSKTGASLALPRREARSARRRTRRRRHRLWRVKRLLEQHGILSMEQIEALYAQRTSSPDVYALRVAGLDRCLIAEEIARVLIHIAHRRGFQSNRKSEIKDSDAGKLLKAVQENENLMQSKGYRTVAEMLVSEATKTDAEGKLVHGKKHGYVSNVRNKAGEYRHTVSRQAIVDEVRKIFAAQRALGNDVMSEELEDSYLKILCSQRNFDDGPGGDSPYGHGSVSPDGVRQSIYERMVGSCTFETGEKRAPRSSYSFERFQLLTKVVNLRIYRQQEDGGRYPCELTQTERARVIDCAYEQTKITYGKLRKLLDMKDTESFAGLTYGLNRSRNKTEDTVFVEMKFYHEVRKALQRAGVFIQDLSIETLDQIGWILSVWKSDDNRRKKLSTLGLSDNVIEELLPLNGSKFGHLSLKAIRKILPFLEDGYSYDVACELAGYQFQGKTEYVKQRLLPPLGEGEVTNPVVRRALSQAIKVVNAVIRKHGSPESIHIELARELSKNLDERRKIEKAQKENQKNNEQIKDEIREILGSAHVTGRDIVKYKLFKQQQEFCMYSGEKLDVTRLFEPGYAEVDHIIPYGISFDDSYDNKVLVKTEQNRQKGNRTPLEYLRDKPEQKAKFIALVESIPLSQKKKNHLLMDKRAIDLEQEGFRERNLSDTRYITRALMNHIQAWLLFDETASTRSKRVVCVNGAVTAYMRARWGLTKDRDAGDKHHAADAVVVACIGDSLIQRVTKYDKFKRNALADRNRYVQQVSKSEGITQYVDKETGEVFTWESFDERKFLPNEPLEPWPFFRDELLARLSDDPSKNIRAIGLLTYSETEQIDPIFVSRMPTRKVTGAAHKETIRSPRIVKVDDNKGTEIQVVVSKVALTELKLTKDGEIKDYFRPEDDPRLYNTLRERLVQFGGDAKAAFKEPVYKISKDGSVRTPVRKVKIQEKLTLGVPVHGGRGIAENGGMVRIDVFAKGGKYYFVPIYVADVLKRELPNRLATAHKPYSEWRVVDDSYQFKFSLYPNDAVMIKPSREVDITYKDRKEPVGCRIMYFVSANIASASISLRTHDNSGELEGLGIQGLEVFEKYVVGPLGDTHPVYKERRMPFRVERKMN

SEQ ID NO: 342 - protein, 1442 aa, Caenispirillum salinarum
MPVLSPLSPNAAQGRRRWSLALDIGEGSIGWAVAEVDAEGRVLQLTGTGVTLFPSAWSNENGTYVAHGAADRAVRGQQQRHDSRRRRLAGLARLCAPVLERSPEDLKDLTRTPPKADPRAIFFLRADAARRPLDGPELFRVLHHMAAHRGIRLAELQEVDPPPESDADDAAPAATEDEDGTRRAAADERAFRRLMAEHMHRHGTQPTCGEIMAGRLRETPAGAQPVTRARDGLRVGGGVAVPTRALIEQEFDAIRAIQAPRHPDLPWDSLRRLVLDQAPIAVPPATPCLFLEELRRRGETFQGRTITREAIDRGLTVDPLIQALRIRETVGNLRLHERITEPDGRQRYVPRAMPELGLSHGELTAPERDTLVRALMHDPDGLAAKDGRIPYTRLRKLIGYDNSPVCFAQERDTSGGGITVNPTDPLMARWIDGWVDLPLKARSLYVRDVVARGADSAALARLLAEGAHGVPPVAAAAVPAATAAILESDIMQPGRYSVCPWAAEAILDAWANAPTEGFYDVTRGLFGFAPGEIVLEDLRRARGALLAHLPRTMAAARTPNRAAQQRGPLPAYESVIPSQLITSLRRAHKGRAADWSAADPEERNPFLRTWTGNAATDHILNQVRKTANEVITKYGNRRGWDPLPSRITVELAREAKHGVIRRNEIAKENRENEGRRKKESAALDTFCQDNTVSWQAGGLPKERAALRLRLAQRQEFFCPYCAERPKLRATDLFSPAETEIDHVIERRMGGDGPDNLVLAHKDCNNAKGKKTPHEHAGDLLDSPALAALWQGWRKENADRLKGKGHKARTPREDKDFMDRVGWRFEEDARAKAEENQERRGRRMLHDTARATRLARLYLAAAVMPEDPAEIGAPPVETPPSPEDPTGYTAIYRTISRVQPVNGSVTHMLRQRLLQRDKNRDYQTHHAEDACLLLLAGPAVVQAFNTEAAQHGADAPDDRPVDLMPTSDAYHQQRRARALGRVPLATVDAALADIVMPESDRQDPETGRVHWRLTRAGRGLKRRIDDLTRNCVILSRPRRPSETGTPGALHNATHYGRREITVDGRTDTVVTQRMNARDLVALLDNAKIVPAARLDAAAPGDTILKEICTEIADRHDRVVDPEGTHARRWISARLAALVPAHAEAVARDIAELADLDALADADRTPEQEARRSALRQSPYLGRAISAKKADGRARAREQEILTRALLDPHWGPRGLRHLIMREARAPSLVRIRANKTDAFGRPVPDAAVWVKTDGNAVSQLWRLTSVVTDDGRRIPLPKPIEKRIEISNLEYARLNGLDEGAGVTGNNAPPRPLRQDIDRLTPLWRDHGTAPGGYLGTAVGELEDKARSALRGKAMRQTLTDAGITAEAGWRLDSEGAVCDLEVAKGDTVKKDGKTYKVGVITQGIFGMPVDAAGSAPRTPEDCEKFEEQYGIKPWKAKGIPLA

SEQ ID NO: 343 - protein, 1114 aa, Eubacterium rectale
MNYTEKEKLFMKYILALDIGIASVGWAILDKESETVIEAGSNIFPEASAADNQLRRDMRGAKRNNRRLKTRINDFIKLWENNNLSIPQFKSTEIVGLKVRAITEEITLDELYLILYSYLKHRGISYLEDALDDTVSGSSAYANGLKLNAKELETHYPCEIQQERLNTIGKYRGQSQIINENGEVLDLSNVFTIGAYRKEIQRVFEIQKKYHPELTDEFCDGYMLIFNRKRKYYEGPGNEKSRTDYGRFTTKLDANGNYITEDNIFEKLIGKCSVYPDELRAAAASYTAQEYNVLNDLNNLTINGRKLEENEKHEIVERIKSSNTINMRKIISDCMGENIDDFAGARIDKSGKEIFHKFEVYNKMRKALLEIGIDISNYSREELDEIGYIMTINTDKEAMMEAFQKSWIDLSDDVKQCLINMRKTNGALFNKWQSFSLKIMNELIPEMYAQPKEQMTLLTEMGVTKGTQEEFAGLKYIPVDVVSEDIFNPVVRRSVRISFKILNAVLKKYKALDTIVIEMPRDRNSEEQKKRINDSQKLNEKEMEYIEKKLAVTYGIKLSPSDFSSQKQLSLKLKLWNEQDGICLYSGKTIDPNDIINNPQLFEIDHIIPRSISFDDARSNKVLVYRSENQKKGNQTPYYYLTHSHSEWSFEQYKATVMNLSKKKEYAISRKKIQNLLYSEDITKMDVLKGFINRNINDTSYASRLVLNTIQNFFMANEADTKVKVIKGSYTHQMRCNLKLDKNRDESYSHHAVDAMLIGYSELGYEAYHKLQGEFIDFETGEILRKDMWDENMSDEVYADYLYGKKWANIRNEVVKAEKNVKYWHYVMRKSNRGLCNQTIRGTREYDGKQYKINKLDIRTKEGIKVFAKLAFSKKDSDRERLLVYLNDRRTFDDLCKIYEDYSDAANPFVQYEKETGDIIRKYSKKHNGPRIDKLKYKDGEVGACIDISHKYGFEKGSKKVILESLVPYRMDVYYKEENHSYYLVGVKQSDIKFEKGRNVIDEEAYARILVNEKMIQPGQSRADLENLGFKFKLSFYKNDIIEYEKDGKIYTERLVSRTMPKQRNYIETKPIDKAKFEKQNLVGLGKTKFIKKYRYDILGNKYSCSEEKFTSFC

SEQ ID NO: 344 - protein, 1314 aa, Mycoplasma synoviae
MLRLYCANNLVLNNVQNLWKYLLLLIFDKKIIFLFKIKVILIRRYMENNNKEKIVIGFDLGVASVGWSIVNAETKEVIDLGVRLFSEPEKADYRRAKRTTRRLLRRKKFKREKFHKLILKNAEIFGLQSRNEILNVYKDQSSKYRNILKLKINALKEEIKPSELVWILRDYLQNRGYFYKNEKLTDEFVSNSFPSKKLHEHYEKYGFFRGSVKLDNKLDNKKDKAKEKDEEEESDAKKESEELIFSNKQWINEIVKVFENQSYLTESFKEEYLKLFNYVRPFNKGPGSKNSRTAYGVFSTDIDPETNKFKDYSNIWDKTIGKCSLFEEEIRAPKNLPSALIFNLQNEICTIKNEFTEFKNWWLNAEQKSEILKFVFTELFNWKDKKYSDKKFNKNLQDKIKKYLLNFALENFNLNEEILKNRDLENDTVLGLKGVKYYEKSNATADAALEFSSLKPLYVFIKFLKEKKLDLNYLLGLENTEILYFLDSIYLAISYSSDLKERNEWFKKLLKELYPKIKNNNLEIIENVEDIFEITDQEKFESFSKTHSLSREAFNHIIPLLLSNNEGKNYESLKHSNEELKKRTEKAELKAQQNQKYLKDNFLKEALVPLSVKTSVLQAIKIFNQIIKNFGKKYEISQVVIEMARELTKPNLEKLLNNATNSNIKILKEKLDQTEKFDDFTKKKFIDKIENSVVFRNKLFLWFEQDRKDPYTQLDIKINEIEDETEIDHVIPYSKSADDSWFNKLLVKKSTNQLKKNKTVWEYYQNESDPEAKWNKFVAWAKRIYLVQKSDKESKDNSEKNSIFKNKKPNLKFKNITKKLFDPYKDLGFLARNLNDTRYATKVFRDQLNNYSKHHSKDDENKLFKVVCMNGSITSFLRKSMWRKNEEQVYRFNFWKKDRDQFFHHAVDASIIAIFSLLTKTLYNKLRVYESYDVQRREDGVYLINKETGEVKKADKDYWKDQHNFLKIRENAIEIKNVLNNVDFQNQVRYSRKANTKLNTQLFNETLYGVKEFENNFYKLEKVNLFSRKDLRKFILEDLNEESEKNKKNENGSRKRILTEKYIVDEILQILENEEFKDSKSDINALNKYMDSLPSKFSEFFSQDFINKCKKENSLILTFDAIKHNDPKKVIKIKNLKFFREDATLKNKQAVHKDSKNQIKSFYESYKCVGFIWLKNKNDLEESIFVPINSRVIHFGDKDKDIFDFDSYNKEKLLNEINLKRPENKKFNSINEIEFVKFVKPGALLLNFENQQIYYISTLESSSLRAKIKLLNKMDKGKAVSMKKITNPDEYKIIEHVNPLGINLNWTKKLENNN

SEQ ID NO: 345 - protein, 1197 aa, Porphyromonas sp.
MLMSKHVLGLDLGVGSIGWCLIALDAQGDPAEILGMGSRVVPLNNATKAIEAFNAGAAFTASQERTARRTMRRGFARYQLRRYRLRRELEKVGMLPDAALIQLPLLELWELRERAATAGRRLTLPELGRVLCHINQKRGYRHVKSDAAAIVGDEGEKKKDSNSAYLAGIRANDEKLQAEHKTVGQYFAEQLRQNQSESPTGGISYRIKDQIFSRQCYIDEYDQIMAVQRVHYPDILTDEFIRMLRDEVIFMQRPLKSCKHLVSLCEFEKQERVMRVQQDDGKGGWQLVERRVKFGPKVAPKSSPLFQLCCIYEAVNNIRLTRPNGSPCDITPEERAKIVAHLQSSASLSFAALKKLLKEKALIADQLTSKSGLKGNSTRVALASALQPYPQYHHLLDMELETRMMTVQLTDEETGEVTEREVAVVTDSYVRKPLYRLWHILYSIEEREAMRRALITQLGMKEEDLDGGLLDQLYRLDFVKPGYGNKSAKFICKLLPQLQQGLGYSEACAAVGYRHSNSPTSEEITERTLLEKIPLLQRNELRQPLVEKILNQMINLVNALKAEYGIDEVRVELARELKMSREERERMARNNKDREERNKGVAAKIRECGLYPTKPRIQKYMLWKEAGRQCLYCGRSIEEEQCLREGGMEVEHIIPKSVLYDDSYGNKTCACRRCNKEKGNRTALEYIRAKGREAEYMKRINDLLKEKKISYSKHQRLRWLKEDIPSDFLERQLRLTQYISRQAMAILQQGIRRVSASEGGVTARLRSLWGYGKILHTLNLDRYDSMGETERVSREGEATEELHITNWSKRMDHRHHAIDALVVACTRQSYIQRLNRLSSEFGREDKKKEDQEAQEQQATETGRLSNLERWLTQRPHFSVRTVSDKVAEILISYRPGQRVVTRGRNIYRKKMADGREVSCVQRGVLVPRGELMEASFYGKILSQGRVRIVKRYPLHDLKGEVVDPHLRELITTYNQELKSREKGAPIPPLCLDKDKKQEVRSVRCYAKTLSLDKAIPMCFDEKGEPTAFVKSASNHHLALYRTPKGKLVESIVTFWDAVDRARYGIPLVITHPREVMEQVLQRGDIPEQVLSLLPPSDWVFVDSLQQDEMVVIGLSDEELQRALEAQNYRKISEHLYRVQKMSSSYYVFRYHLETSVADDKNTSGRIPKFHRVQSLKAYEERNIRKVRVDLLGRISLL

SEQ ID NO: 346 - protein, 1121 aa, Streptococcus thermophilus
MSDLVLGLDIGIGSVGVGILNKVTGEIIHKNSRIFPAAQAENNLVRRTNRQGRRLARRKKHRRVRLNRLFEESGLITDFTKISINLNPYQLRVKGLTDELSNEELFIALKNMVKHRGISYLDDASDDGNSSVGDYAQIVKENSKQLETKTPGQIQLERYQTYGQLRGDFTVEKDGKKHRLINVFPTSAYRSEALRILQTQQEFNPQITDEFINRYLEILTGKRKYYHGPGNEKSRTDYGRYRTSGETLDNIFGILIGKCTFYPDEFRAAKASYTAQEFNLLNDLNNLTVPTETKKLSKEQKNQIINYVKNEKAMGPAKLFKYIAKLLSCDVADIKGYRIDKSGKAEIHTFEAYRKMKTLETLDIEQMDRETLDKLAYVLTLNTEREGIQEALEHEFADGSFSQKQVDELVQFRKANSSIFGKGWHNFSVKLMMELIPELYETSEEQMTILTRLGKQKTTSSSNKTKYIDEKLLTEEIYNPVVAKSVRQAIKIVNAAIKEYGDFDNIVIEMARETNEDDEKKAIQKIQKANKDEKDAAMLKAANQYNGKAELPHSVFHGHKQLATKIRLWHQQGERCLYTGKTISIHDLINNSNQFEVDHILPLSITFDDSLANKVLVYATANQEKGQRTPYQALDSMDDAWSFRELKAFVRESKTLSNKKKEYLLTEEDISKFDVRKKFIERNLVDTRYASRVVLNALQEHFRAHKIDTKVSVVRGQFTSQLRRHWGIEKTRDTYHHHAVDALIIAASSQLNLWKKQKNTLVSYSEDQLLDIETGELISDDEYKESVFKAPYQHFVDTLKSKEFEDSILFSYQVDSKFNRKISDATIYATRQAKVGKDKADETYVLGKIKDIYTQDGYDAFMKIYKKDKSKFLMYRHDPQTFEKVIEPILENYPNKQINEKGKEVPCNPFLKYKEEHGYIRKYSKKGNGPEIKSLKYYDSKLGNHIDITPKDSNNKVVLQSVSPWRADVYFNKTTGKYEILGLKYADLQFEKGTGTYKISQEKYNDIKKKEGVDSDSEFKFTLYKNDLLLVKDTETKEQQLFRFLSRTMPKQKHYVELKPYDKQKFEGGEALIKVLGNVANSGQCKKGLGKSNISIYKVRTDVLGNQHIIKNEGDKPKLDF

SEQ ID NO: 347 - protein, 1152 aa, Roseburia inulinivorans
MNAEHGKEGLLIMEENFQYRIGLDIGITSVGWAVLQNNSQDEPVRITDLGVRIFDVAENPKNGDALAAPRRDARTTRRRLRRRRHRLERIKFLLQENGLIEMDSFMERYYKGNLPDVYQLRYEGLDRKLKDEELAQVLIHIAKHRGFRSTRKAETKEKEGGAVLKATTENQKIMQEKGYRTVGEMLYLDEAFHTECLWNEKGYVLTPRNRPDDYKHTILRSMLVEEVHAIFAAQRAHGNQKATEGLEEAYVEIMTSQRSFDMGPGLQPDGKPSPYAMEGFGDRVGKCTFEKDEYRAPKATYTAELFVALQKINHTKLIDEFGTGRFFSEEERKTIIGLLLSSKELKYGTIRKKLNIDPSLKFNSLNYSAKKEGETEEERVLDTEKAKFASMFWTYEYSKCLKDRTEEMPVGEKADLFDRIGEILTAYKNDDSRSSRLKELGLSGEEIDGLLDLSPAKYQRVSLKAMRKMQPYLEDGLIYDKACEAAGYDFRALNDGNKKHLLKGEEINAIVNDITNPVVKRSVSQTIKVINAIIQKYGSPQAVNIELAREMSKNFQDRTNLEKEMKKRQQENERAKQQIIELGKQNPTGQDILKYRLWNDQGGYCLYSGKKIPLEELFDGGYDIDHILPYSITFDDSYRNKVLVTAQENRQKGNRTPYEYFGADEKRWEDYEASVRLLVRDYKKQQKLLKKNFTEEERKEFKERNLNDTKYITRVVYNMIRQNLELEPFNHPEKKKQVWAVNGAVTSYLRKRWGLMQKDRSTDRHHAMDAVVIACCTDGMIHKISRYMQGRELAYSRNFKFPDEETGEILNRDNFTREQWDEKFGVKVPLPWNSFRDELDIRLLNEDPKNFLLTHADVQRELDYPGWMYGEEESPIEEGRYINYIRPLFVSRMPNHKVTGSAHDATIRSARDYETRGVVITKVPLTDLKLNKDNEIEGYYDKDSDRLLYQALVRQLLLHGNDGKKAFAEDFHKPKADGTEGPVVRKVKIEKKQTSGVMVRGGTGIAANGEMVRIDVFRENGKYYFVPVYTADVVRKVLPNRAATHTKPYSEWRVMDDANFVFSLYSRDLIHVKSKKDIKTNLVNGGLLLQKEIFAYYTGADIATASIAGFANDSNFKFRGLGIQSLEIFEKCQVDILGNISVVRHENRQEFH

SEQ ID NO: 348 - protein, 1082 aa, Methylosinus trichosporium
MRVLGLDAGIASLGWALIEIEESNRGELSQGTIIGAGTWMFDAPEEKTQAGAKLKSEQRRTFRGQRRVVRRRRQRMNEVRRILHSHGLLPSSDRDALKQPGLDPWRIRAEALDRLLGPVELAVALGHIARHRGFKSNSKGAKTNDPADDTSKMKRAVNETREKLARFGSAAKMLVEDESFVLRQTPTKNGASEIVRRFRNREGDYSRSLLRDDLAAEMRALFTAQARFQSAIATADLQTAFTKAAFFQRPLQDSEKLVGPCPFEVDEKRAPKRGYSFELFRFLSRLNHVTLRDGKQERTLTRDELALAAADFGAAAKVSFTALRKKLKLPETTVFVGVKADEESKLDVVARSGKAAEGTARLRSVIVDALGELAWGALLCSPEKLDKIAEVISFRSDIGRISEGLAQAGCNAPLVDALTAAASDGRFDPFTGAGHISSKAARNILSGLRQGMTYDKACCAADYDHTASRERGAFDVGGHGREALKRILQEERISRELVGSPTARKALIESIKQVKAIVERYGVPDRIHVELARDVGKSIEEREEITRGIEKRNRQKDKLRGLFEKEVGRPPQDGARGKEELLRFELWSEQMGRCLYTDDYISPSQLVATDDAVQVDHILPWSRFADDSYANKTLCMAKANQDKKGRTPYEWFKAEKTDTEWDAFIVRVEALADMKGFKKRNYKLRNAEEAAAKFRNRNLNDTRWACRLLAEALKQLYPKGEKDKDGKERRRVFSRPGALTDRLRRAWGLQWMKKSTKGDRIPDDRHHALDAIVIAATTESLLQRATREVQEIEDKGLHYDLVKNVTPPWPGFREQAVEAVEKVFVARAERRRARGKAHDATIRHIAVREGEQRVYERRKVAELKLADLDRVKDAERNARLIEKLRNWIEAGSPKDDPPLSPKGDPIFKVRLVTKSKVNIALDTGNPKRPGTVDRGEMARVDVFRKASKKGKYEYYLVPIYPHDIATMKTPPIRAVQAYKPEDEWPEMDSSYEFCWSLVPMTYLQVISSKGEIFEGYYRGMNRSVGAIQLSAHSNSSDVVQGIGARTLTEFKKFNVDRFGRKHEVERELRTWRGETWRGKAYI

SEQ ID NO: 349 - protein, 1156 aa, Ruminococcus albus
MGNYYLGLDVGIGSIGWAVINIEKKRIEDFNVRIFKSGEIQEKNRNSRASQQCRRSRGLRRLYRRKSHRKLRLKNYLSIIGLTTSEKIDYYYETADNNVIQLRNKGLSEKLTPEEIAACLIHICNNRGYKDFYEVNVEDIEDPDERNEYKEEHDSIVLISNLMNEGGYCTPAEMICNCREFDEPNSVYRKFHNSAASKNHYLITRHMLVKEVDLILENQSKYYGILDDKTIAKIKDIIFAQRDFEIGPGKNERFRRFTGYLDSIGKCQFFKDQERGSRFTVIADIYAFVNVLSQYTYTNNRGESVFDTSFANDLINSALKNGSMDKRELKAIAKSYHIDISDKNSDTSLTKCFKYIKVVKPLFEKYGYDWDKLIENYTDTDNNVLNRIGIVLSQAQTPKRRREKLKALNIGLDDGLINELTKLKLSGTANVSYKYMQGSIEAFCEGDLYGKYQAKFNKEIPDIDENAKPQKLPPFKNEDDCEFFKNPVVFRSINETRKLINAIIDKYGYPAAVNIETADELNKTFEDRAIDTKRNNDNQKENDRIVKEIIECIKCDEVHARHLIEKYKLWEAQEGKCLYSGETITKEDMLRDKDKLFEVDHIVPYSLILDNTINNKALVYAEENQKKGQRTPLMYMNEAQAADYRVRVNTMFKSKKCSKKKYQYLMLPDLNDQELLGGWRSRNLNDTRYICKYLVNYLRKNLRFDRSYESSDEDDLKIRDHYRVFPVKSRFTSMFRRWWLNEKTWGRYDKAELKKLTYLDHAADAIIIANCRPEYVVLAGEKLKLNKMYHQAGKRITPEYEQSKKACIDNLYKLFRMDRRTAEKLLSGHGRLTPIIPNLSEEVDKRLWDKNIYEQFWKDDKDKKSCEELYRENVASLYKGDPKFASSLSMPVISLKPDHKYRGTITGEEAIRVKEIDGKLIKLKRKSISEITAESINSIYTDDKILIDSLKTIFEQADYKDVGDYLKKTNQHFFTTSSGKRVNKVTVIEKVPSRWLRKEIDDNNFSLLNDSSYYCIELYKDSKGDNNLQGIAMSDIVHDRKTKKLYLKPDFNYPDDYYTHVMYIFPGDYLRIKSTSKKSGEQLKFEGYFISVKNVNENSFRFISDNKPCAKDKRVSITKKDIVIKLAVDLMGKVQGENNGKGISCGEPLSLLKEKN

SEQ ID NO: 350 - protein, 1187 aa, Bifidobacterium longum
MLSRQLLGASHLARPVSYSYNVQDNDVHCSYGERCFMRGKRYRIGIDVGLNSVGLAAVEVSDENSPVRLLNAQSVIHDGGVDPQKNKEAITRKNMSGVARRTRRMRRRKRERLHKLDMLLGKFGYPVIEPESLDKPFEEWHVRAELATRYIEDDELRRESISIALRHMARHRGWRNPYRQVDSLISDNPYSKQYGELKEKAKAYNDDATAAEEESTPAQLVVAMLDAGYAEAPRLRWRTGSKKPDAEGYLPVRLMQEDNANELKQIFRVQRVPADEWKPLFRSVFYAVSPKGSAEQRVGQDPLAPEQARALKASLAFQEYRIANVITNLRIKDASAELRKLTVDEKQSIYDQLVSPSSEDITWSDLCDFLGFKRSQLKGVGSLTEDGEERISSRPPRLTSVQRIYESDNKIRKPLVAWWKSASDNEHEAMIRLLSNTVDIDKVREDVAYASAIEFIDGLDDDALTKLDSVDLPSGRAAYSVETLQKLTRQMLTTDDDLHEARKTLFNVTDSWRPPADPIGEPLGNPSVDRVLKNVNRYLMNCQQRWGNPVSVNIEHVRSSFSSVAFARKDKREYEKNNEKRSIFRSSLSEQLRADEQMEKVRESDLRRLEAIQRQNGQCLYCGRTITFRTCEMDHIVPRKGVGSTNTRTNFAAVCAECNRMKSNTPFAIWARSEDAQTRGVSLAEAKKRVTMFTFNPKSYAPREVKAFKQAVIARLQQTEDDAAIDNRSIESVAWMADELHRRIDWYFNAKQYVNSASIDDAEAETMKTTVSVFQGRVTASARRAAGIEGKIHFIGQQSKTRLDRRHHAVDASVIAMMNTAAAQTLMERESLRESQRLIGLMPGERSWKEYPYEGTSRYESFHLWLDNMDVLLELLNDALDNDRIAVMQSQRYVLGNSIAHDATIHPLEKVPLGSAMSADLIRRASTPALWCALTRLPDYDEKEGLPEDSHREIRVHDTRYSADDEMGFFASQAAQIAVQEGSADIGSAIHHARVYRCWKTNAKGVRKYFYGMIRVFQTDLLRACHDDLFTVPLPPQSISMRYGEPRVVQALQSGNAQYLGSLVVGDEIEMDFSSLDVDGQIGEYLQFFSQFSGGNLAWKHWVVDGFFNQTQLRIRPRYLAAEGLAKAFSDDVVPDGVQKIVTKQGWLPPVNTASKTAVRIVRRNAFGEPRLSSAHHMPCSWQWRHE

SEQ ID NO: 351 - protein, 1150 aa, Enterococcus faecalis
MYSIGLDLGISSVGWSVIDERTGNVIDLGVRLFSAKNSEKNLERRTNRGGRRLIRRKTNRLKDAKKILAAVGFYEDKSLKNSCPYQLRVKGLTEPLSRGEIYKVTLHILKKRGISYLDEVDTEAAKESQDYKEQVRKNAQLLTKYTPGQIQLQRLKENNRVKTGINAQGNYQLNVFKVSAYANELATILKTQQAFYPNELTDDWIALFVQPGIAEEAGLIYRKRPYYHGPGNEANNSPYGRWSDFQKTGEPATNIFDKLIGKDFQGELRASGLSLSAQQYNLLNDLTNLKIDGEVPLSSEQKEYILTELMTKEFTRFGVNDVVKLLGVKKERLSGWRLDKKGKPEIHTLKGYRNWRKIFAEAGIDLATLPTETIDCLAKVLTLNTEREGIENTLAFELPELSESVKLLVLDRYKELSQSISTQSWHRFSLKTLHLLIPELMNATSEQNTLLEQFQLKSDVRKRYSEYKKLPTKDVLAEIYNPTVNKTVSQAFKVIDALLVKYGKEQIRYITIEMPRDDNEEDEKKRIKELHAKNSQRKNDSQSYFMQKSGWSQEKFQTTIQKNRRFLAKLLYYYEQDGICAYTGLPISPELLVSDSTEIDHIIPISISLDDSINNKVLVLSKANQVKGQQTPYDAWMDGSFKKINGKFSNWDDYQKWVESRHFSHKKENNLLETRNIFDSEQVEKFLARNLNDTRYASRLVLNTLQSFFTNQETKVRVVNGSFTHTLRKKWGADLDKTRETHHHHAVDATLCAVTSFVKVSRYHYAVKEETGEKVMREIDFETGEIVNEMSYWEFKKSKKYERKTYQVKWPNFREQLKPVNLHPRIKFSHQVDRKANRKLSDATIYSVREKTEVKTLKSGKQKITTDEYTIGKIKDIYTLDGWEAFKKKQDKLLMKDLDEKTYERLLSIAETTPDFQEVEEKNGKVKRVKRSPFAVYCEENDIPAIQKYAKKNNGPLIRSLKYYDGKLNKHINITKDSQGRPVEKTKNGRKVTLQSLKPYRYDIYQDLETKAYYTVQLYYSDLRFVEGKYGITEKEYMKKVAEQTKGQVVRFCFSLQKNDGLEIEWKDSQRYDVRFYNFQSANSINFKGLEQEMMPAENQFKQKPYNNGAINLNIAKYGKEGKKLRKFNTDILGKKHYLFYEKEPKNIIK

SEQ ID NO: 352 - protein, 1236 aa, Mycoplasma mobile
MYFYKNKENKLNKKVVLGLDLGIASVGWCLTDISQKEDNKFPIILHGVRLFETVDDSDDKLLNETRRKKRGQRRRNRRLFTRKRDFIKYLIDNNIIELEFDKNPKILVRNFIEKYINPFSKNLELKYKSVTNLPIGFHNLRKAAINEKYKLDKSELIVLLYFYLSLRGAFFDNPEDTKSKEMNKNEIEIFDKNESIKNAEFPIDKIIEFYKISGKIRSTINLKFGHQDYLKEIKQVFEKQNIDFMNYEKFAMEEKSFFSRIRNYSEGPGNEKSFSKYGLYANENGNPELIINEKGQKIYTKIFKTLWESKIGKCSYDKKLYRAPKNSFSAKVFDITNKLTDWKHKNEYISERLKRKILLSRFLNKDSKSAVEKILKEENIKFENLSEIAYNKDDNKINLPIINAYHSLTTIFKKHLINFENYLISNENDLSKLMSFYKQQSEKLFVPNEKGSYEINQNNNVLHIFDAISNILNKFSTIQDRIRILEGYFEFSNLKKDVKSSEIYSEIAKLREFSGTSSLSFGAYYKFIPNLISEGSKNYSTISYEEKALQNQKNNFSHSNLFEKTWVEDLIASPTVKRSLRQTMNLLKEIFKYSEKNNLEIEKIVVEVTRSSNNKHERKKIEGINKYRKEKYEELKKVYDLPNENTTLLKKLWLLRQQQGYDAYSLRKIEANDVINKPWNYDIDHIVPRSISFDDSFSNLVIVNKLDNAKKSNDLSAKQFIEKIYGIEKLKEAKENWGNWYLRNANGKAFNDKGKFIKLYTIDNLDEFDNSDFINRNLSDTSYITNALVNHLTFSNSKYKYSVVSVNGKQTSNLRNQIAFVGIKNNKETEREWKRPEGFKSINSNDFLIREEGKNDVKDDVLIKDRSFNGHHAEDAYFITIISQYFRSFKRIERLNVNYRKETRELDDLEKNNIKFKEKASFDNFLLINALDELNEKLNQMRFSRMVITKKNTQLFNETLYSGKYDKGKNTIKKVEKLNLLDNRTDKIKKIEEFFDEDKLKENELTKLHIFNHDKNLYETLKIIWNEVKIEIKNKNLNEKNYFKYFVNKKLQEGKISFNEWVPILDNDFKIIRKIRYIKFSSEEKETDEIIFSQSNFLKIDQRQNFSFHNTLYWVQIWVYKNQKDQYCFISIDARNSKFEKDEIKINYEKLKTQKEKLQIINEEPILKINKGDLFENEEKELFYIVGRDEKPQKLEIKYILGKKIKDQKQIQKPVKKYFPNWKKVNLTYMGEIFKK

SEQ ID NO: 353 - protein, 1105 aa, Actinomyces coleocanis
MDNKNYRIGIDVGLNSIGFCAVEVDQHDTPLGFLNLSVYRHDAGIDPNGKKTNTTRLAMSGVARRTRRLFRKRKRRLAALDRFIEAQGWTLPDHADYKDPYTPWLVRAELAQTPIRDENDLHEKLAIAVRHIARHRGWRSPWVPVRSLHVEQPPSDQYLALKERVEAKTLLQMPEGATPAEMVVALDLSVDVNLRPKNREKTDTRPENKKPGFLGGKLMQSDNANELRKIAKIQGLDDALLRELIELVFAADSPKGASGELVGYDVLPGQHGKRRAEKAHPAFQRYRIASIVSNLRIRHLGSGADERLDVETQKRVFEYLLNAKPTADITWSDVAEEIGVERNLLMGTATQTADGERASAKPPVDVTNVAFATCKIKPLKEWWLNADYEARCVMVSALSHAEKLTEGTAAEVEVAEFLQNLSDEDNEKLDSFSLPIGRAAYSVDSLERLTKRMIENGEDLFEARVNEFGVSEDWRPPAEPIGARVGNPAVDRVLKAVNRYLMAAEAEWGAPLSVNIEHVREGFISKRQAVEIDRENQKRYQRNQAVRSQIADHINATSGVRGSDVTRYLAIQRQNGECLYCGTAITFVNSEMDHIVPRAGLGSTNTRDNLVATCERCNKSKSNKPFAVWAAECGIPGVSVAEALKRVDFWIADGFASSKEHRELQKGVKDRLKRKVSDPEIDNRSMESVAWMARELAHRVQYYFDEKHTGTKVRVFRGSLTSAARKASGFESRVNFIGGNGKTRLDRRHHAMDAATVAMLRNSVAKTLVLRGNIRASERAIGAAETWKSFRGENVADRQIFESWSENMRVLVEKFNLALYNDEVSIFSSLRLQLGNGKAHDDTITKLQMHKVGDAWSLTEIDRASTPALWCALTRQPDFTWKDGLPANEDRTIIVNGTHYGPLDKVGIFGKAAASLLVRGGSVDIGSAIHHARIYRIAGKKPTYGMVRVFAPDLLRYRNEDLFNVELPPQSVSMRYAEPKVREAIREGKAEYLGWLVVGDELLLDLSSETSGQIAELQQDFPGTTHWTVAGFFSPSRLRLRPVYLAQEGLGEDVSEGSKSIIAGQGWRPAVNKVFGSAMPEVIRRDGLGRKRRFSYSGLPVSWQG

SEQ ID NO: 354 - protein, 1079 aa, Dinoroseobacter shibae
MRLGLDIGTSSIGWWLYETDGAGSDARITGVVDGGVRIFSDGRDPKSGASLAVDRRAARAMRRRRDRYLRRRATLMKVLAETGLMPADPAEAKALEALDPFALRAAGLDEPLPLPHLGRALFHLNQRRGFKSNRKTDRGDNESGKIKDATARLDMEMMANGARTYGEFLHKRRQKATDPRHVPSVRTRLSIANRGGPDGKEEAGYDFYPDRRHLEEEFHKLWAAQGAHHPELTETLRDLLFEKIFFQRPLKEPEVGLCLFSGHHGVPPKDPRLPKAHPLTQRRVLYETVNQLRVTADGREARPLTREERDQVIHALDNKKPTKSLSSMVLKLPALAKVLKLRDGERFTLETGVRDAIACDPLRASPAHPDRFGPRWSILDADAQWEVISRIRRVQSDAEHAALVDWLTEAHGLDRAHAEATAHAPLPDGYGRLGLTATTRILYQLTADVVTYADAVKACGWHHSDGRTGECFDRLPYYGEVLERHVIPGSYHPDDDDITRFGRITNPTVHIGLNQLRRLVNRIIETHGKPHQIVVELARDLKKSEEQKRADIKRIRDTTEAAKKRSEKLEELEIEDNGRNRMLLRLWEDLNPDDAMRRFCPYTGTRISAAMIFDGSCDVDHILPYSRTLDDSFPNRTLCLREANRQKRNQTPWQAWGDTPHWHAIAANLKNLPENKRWRFAPDAMTRFEGENGFLDRALKDTQYLARISRSYLDTLFTKGGHVWVVPGRFTEMLRRHWGLNSLLSDAGRGAVKAKNRTDHRHHAIDAAVIAATDPGLLNRISRAAGQGEAAGQSAELIARDTPPPWEGFRDDLRVRLDRIIVSHRADHGRIDHAARKQGRDSTAGQLHQETAYSIVDDIHVASRTDLLSLKPAQLLDEPGRSGQVRDPQLRKALRVATGGKTGKDFENALRYFASKPGPYQAIRRVRIIKPLQAQARVPVPAQDPIKAYQGGSNHLFEIWRLPDGEIEAQVITSFEAHTLEGEKRPHPAAKRLLRVHKGDMVALERDGRRVVGHVQKMDIANGLFIVPHNEANADTRNNDKSDPFKWIQIGARPAIASGIRRVSVDEIGRLRDGGTRPI

SEQ ID NO: 355 - protein, 1181 aa, Actinomyces sp.
MLHCIAVIRVPPSEEPGFFETHADSCALCHHGCMTYAANDKAIRYRVGIDVGLRSIGFCAVEVDDEDHPIRILNSVVHVHDAGTGGPGETESLRKRSGVAARARRRGRAEKQRLKKLDVLLEELGWGVSSNELLDSHAPWHIRKRLVSEYIEDETERRQCLSVAMAHIARHRGWRNSFSKVDTLLLEQAPSDRMQGLKERVEDRTGLQFSEEVTQGELVATLLEHDGDVTIRGFVRKGGKATKVHGVLEGKYMQSDLVAELRQICRTQRVSETTFEKLVLSIFHSKEPAPSAARQRERVGLDELQLALDPAAKQPRAERAHPAFQKFKVVATLANMRIREQSAGERSLTSEELNRVARYLLNHTESESPTWDDVARKLEVPRHRLRGSSRASLETGGGLTYPPVDDTTVRVMSAEVDWLADWWDCANDESRGHMIDAISNGCGSEPDDVEDEEVNELISSATAEDMLKLELLAKKLPSGRVAYSLKTLREVTAAILETGDDLSQAITRLYGVDPGWVPTPAPIEAPVGNPSVDRVLKQVARWLKFASKRWGVPQTVNIEHTREGLKSASLLEEERERWERFEARREIRQKEMYKRLGISGPFRRSDQVRYEILDLQDCACLYCGNEINFQTFEVDHIIPRVDASSDSRRTNLAAVCHSCNSAKGGLAFGQWVKRGDCPSGVSLENAIKRVRSWSKDRLGLTEKAMGKRKSEVISRLKTEMPYEEFDGRSMESVAWMAIELKKRIEGYFNSDRPEGCAAVQVNAYSGRLTACARRAAHVDKRVRLIRLKGDDGHHKNRFDRRNHAMDALVIALMTPAIARTIAVREDRREAQQLTRAFESWKNFLGSEERMQDRWESWIGDVEYACDRLNELIDADKIPVTENLRLRNSGKLHADQPESLKKARRGSKRPRPQRYVLGDALPADVINRVTDPGLWTALVRAPGFDSQLGLPADLNRGLKLRGKRISADFPIDYFPTDSPALAVQGGYVGLEFHHARLYRIIGPKEKVKYALLRVCAIDLCGIDCDDLFEVELKPSSISMRTADAKLKEAMGNGSAKQIGWLVLGDEIQIDPTKFPKQSIGKFLKECGPVSSWRVSALDTPSKITLKPRLLSNEPLLKTSRVGGHESDLVVAECVEKIMKKTGWVVEINALCQSGLIRVIRRNALGEVRTSPKSGLPISLNLR

SEQ ID NO: 356 - protein, 1113 aa, Alcanivorax sp.
MRYRVGLDLGTASVGAAVFSMDEQGNPMELIWHYERLFSEPLVPDMGQLKPKKAARRLARQQRRQIDRRASRLRRIAIVSRRLGIAPGRNDSGVHGNDVPTLRAMAVNERIELGQLRAVLLRMGKKRGYGGTFKAVRKVGEAGEVASGASRLEEEMVALASVQNKDSVTVGEYLAARVEHGLPSKLKVAANNEYYAPEYALFRQYLGLPAIKGRPDCLPNMYALRHQIEHEFERIWATQSQFHDVMKDHGVKEEIRNAIFFQRPLKSPADKVGRCSLQTNLPRAPRAQIAAQNFRIEKQMADLRWGMGRRAEMLNDHQKAVIRELLNQQKELSFRKIYKELERAGCPGPEGKGLNMDRAALGGRDDLSGNTTLAAWRKLGLEDRWQELDEVTQIQVINFLADLGSPEQLDTDDWSCRFMGKNGRPRNFSDEFVAFMNELRMTDGFDRLSKMGFEGGRSSYSIKALKALTEWMIAPHWRETPETHRVDEEAAIRECYPESLATPAQGGRQSKLEPPPLTGNEVVDVALRQVRHTINMMIDDLGSVPAQIVVEMAREMKGGVTRRNDIEKQNKRFASERKKAAQSIEENGKTPTPARILRYQLWIEQGHQCPYCESNISLEQALSGAYTNFEHILPRTLTQIGRKRSELVLAHRECNDEKGNRTPYQAFGHDDRRWRIVEQRANALPKKSSRKTRLLLLKDFEGEALTDESIDEFADRQLHESSWLAKVTTQWLSSLGSDVYVSRGSLTAELRRRWGLDTVIPQVRFESGMPVVDEEGAEITPEEFEKFRLQWEGHRVTREMRTDRRPDKRIDHRHHLVDAIVTALTSRSLYQQYAKAWKVADEKQRHGRVDVKVELPMPILTIRDIALEAVRSVRISHKPDRYPDGRFFEATAYGIAQRLDERSGEKVDWLVSRKSLTDLAPEKKSIDVDKVRANISRIVGEAIRLHISNIFEKRVSKGMTPQQALREPIEFQGNILRKVRCFYSKADDCVRIEHSSRRGHHYKMLLNDGFAYMEVPCKEGILYGVPNLVRPSEAVGIKRAPESGDFIRFYKGDTVKNIKTGRVYTIKQILGDGGGKLILTPVTETKPADLLSAKWGRLKVGGRNIHLLRLCAE

SEQ ID NO: 357 - protein, 1052 aa, Aminomonas paucivorans
MIGEHVRGGCLFDDHWTPNWGAFRLPNTVRTFTKAENPKDGSSLAEPRRQARGLRRRLRRKTQRLEDLRRLLAKEGVLSLSDLETLFRETPAKDPYQLRAEGLDRPLSFPEWVRVLYHITKHRGFQSNRRNPVEDGQERSRQEEEGKLLSGVGENERLLREGGYRTAGEMLARDPKFQDHRRNRAGDYSHTLSRSLLLEEARRLFQSQRTLGNPHASSNLEEAFLHLVAFQNPFASGEDIRNKAGHCSLEPDQIRAPRRSASAETFMLLQKTGNLRLIHRRTGEERPLTDKEREQIHLLAWKQEKVTHKTLRRHLEIPEEWLFTGLPYHRSGDKAEEKLFVHLAGIHEIRKALDKGPDPAVWDTLRSRRDLLDSIADTLTFYKNEDEILPRLESLGLSPENARALAPLSFSGTAHLSLSALGKLLPHLEEGKSYTQARADAGYAAPPPDRHPKLPPLEEADWRNPVVFRALTQTRKVVNALVRRYGPPWCIHLETARELSQPAKVRRRIETEQQANEKKKQQAEREFLDIVGTAPGPGDLLKMRLWREQGGFCPYCEEYLNPTRLAEPGYAEMDHILPYSRSLDNGWHNRVLVHGKDNRDKGNRTPFEAFGGDTARWDRLVAWVQASHLSAPKKRNLLREDFGEEAERELKDRNLTDTRFITKTAATLLRDRLTFHPEAPKDPVMTLNGRLTAFLRKQWGLHKNRKNGDLHHALDAAVLAVASRSFVYRLSSHNAAWGELPRGREAENGFSLPYPAFRSEVLARLCPTREEILLRLDQGGVGYDEAFRNGLRPVFVSRAPSRRLRGKAHMETLRSPKWKDHPEGPRTASRIPLKDLNLEKLERMVGKDRDRKLYEALRERLAAFGGNGKKAFVAPFRKPCRSGEGPLVRSLRIFDSGYSGVELRDGGEVYAVADHESMVRVDVYAKKNRFYLVPVYVADVARGIVKNRAIVAHKSEEEWDLVDGSFDFRFSLFPGDLVEIEKKDGAYLGYYKSCHRGDGRLLLDRHDRMPRESDCGTFYVSTRKDVLSMSKYQVDPLGEIRLVGSEKPPFVL

SEQ ID NO: 358 - protein, 1233 aa, Mycoplasma canis
MEKKRKVTLGFDLGIASVGWAIVDSETNQVYKLGSRLFDAPDTNLERRTQRGTRRLLRRRKYRNQKFYNLVKRTEVFGLSSREAIENRFRELSIKYPNIIELKTKALSQEVCPDEIAWILHDYLKNRGYFYDEKETKEDFDQQTVESMPSYKLNEFYKKYGYFKGALSQPTESEMKDNKDLKEAFFFDFSNKEWLKEINYFFNVQKNILSETFIEEFKKIFSFTRDISKGPGSDNMPSPYGIFGEFGDNGQGGRYEHIWDKNIGKCSIFTNEQRAPKYLPSALIFNFLNELANIRLYSTDKKNIQPLWKLSSVDKLNILLNLFNLPISEKKKKLTSTNINDIVKKESIKSIMISVEDIDMIKDEWAGKEPNVYGVGLSGLNIEESAKENKFKFQDLKILNVLINLLDNVGIKFEFKDRNDIIKNLELLDNLYLFLIYQKESNNKDSSIDLFIAKNESLNIENLKLKLKEFLLGAGNEFENHNSKTHSLSKKAIDEILPKLLDNNEGWNLEAIKNYDEEIKSQIEDNSSLMAKQDKKYLNDNFLKDAILPPNVKVTFQQAILIFNKIIQKFSKDFEIDKVVIELAREMTQDQENDALKGIAKAQKSKKSLVEERLEANNIDKSVFNDKYEKLIYKIFLWISQDFKDPYTGAQISVNEIVNNKVEIDHIIPYSLCFDDSSANKVLVHKQSNQEKSNSLPYEYIKQGHSGWNWDEFTKYVKRVFVNNVDSILSKKERLKKSENLLTASYDGYDKLGFLARNLNDTRYATILFRDQLNNYAEHHLIDNKKMFKVIAMNGAVTSFIRKNMSYDNKLRLKDRSDFSHHAYDAAIIALFSNKTKTLYNLIDPSLNGIISKRSEGYWVIEDRYTGEIKELKKEDWTSIKNNVQARKIAKEIEEYLIDLDDEVFFSRKTKRKTNRQLYNETIYGIATKTDEDGITNYYKKEKFSILDDKDIYLRLLREREKFVINQSNPEVIDQIIEIIESYGKENNIPSRDEAINIKYTKNKINYNLYLKQYMRSLTKSLDQFSEEFINQMIANKTFVLYNPTKNTTRKIKFLRLVNDVKINDIRKNQVINKFNGKNNEPKAFYENINSLGAIVFKNSANNFKTLSINTQIAIFGDKNWDIEDFKTYNMEKIEKYKEIYGIDKTYNFHSFIFPGTILLDKQNKEFYYISSIQTVRDIIEIKFLNKIEFKDENKNQDTSKTPKRLMFGIKSIMNNYEQVDISPFGINKKIFE

SEQ ID NO: 359 - protein, 1119 aa, Lactobacillus coryniformis
MGYRIGLDVGITSTGYAVLKTDKNGLPYKILTLDSVIYPRAENPQTGASLAEPRRIKRGLRRRTRRTKFRKQRTQQLFIHSGLLSKPEIEQILATPQAKYSVYELRVAGLDRRLTNSELFRVLYFFIGHRGFKSNRKAELNPENEADKKQMGQLLNSIEEIRKAIAEKGYRTVGELYLKDPKYNDHKRNKGYIDGYLSTPNRQMLVDEIKQILDKQRELGNEKLTDEFYATYLLGDENRAGIFQAQRDFDEGPGAGPYAGDQIKKMVGKDIFEPTEDRAAKATYTFQYFNLLQKMTSLNYQNTTGDTWHTLNGLDRQAIIDAVFAKAEKPTKTYKPTDFGELRKLLKLPDDARFNLVNYGSLQTQKEIETVEKKTRFVDFKAYHDLVKVLPEEMWQSRQLLDHIGTALTLYSSDKRRRRYFAEELNLPAELIEKLLPLNFSKFGHLSIKSMQNIIPYLEMGQVYSEATTNTGYDFRKKQISKDTIREEITNPVVRRAVTKTIKIVEQIIRRYGKPDGINIELARELGRNFKERGDIQKRQDKNRQTNDKIAAELTELGIPVNGQNIIRYKLHKEQNGVDPYTGDQIPFERAFSEGYEVDHIIPYSISWDDSYTNKVLTSAKCNREKGNRIPMVYLANNEQRLNALTNIADNIIRNSRKRQKLLKQKLSDEELKDWKQRNINDTRFITRVLYNYFRQAIEFNPELEKKQRVLPLNGEVTSKIRSRWGFLKVREDGDLHHAIDATVIAAITPKFIQQVTKYSQHQEVKNNQALWHDAEIKDAEYAAEAQRMDADLFNKIFNGFPLPWPEFLDELLARISDNPVEMMKSRSWNTYTPIEIAKLKPVFVVRLANHKISGPAHLDTIRSAKLFDEKGIVLSRVSITKLKINKKGQVATGDGIYDPENSNNGDKVVYSAIRQALEAHNGSGELAFPDGYLEYVDHGTKKLVRKVRVAKKVSLPVRLKNKAAADNGSMVRIDVFNTGKKFVFVPIYIKDTVEQVLPNKAIARGKSLWYQITESDQFCFSLYPGDMVHIESKTGIKPKYSNKENNTSVVPIKNFYGYFDGADIATASILVRAHDSSYTARSIGIAGLLKFEKYQVDYFGRYHKVHEKKRQLFVKRDE

SEQ ID NO: 360 - protein, 1195 aa, Elusimicrobium minutum
MQKNINTKQNHIYIKQAQKIKEKLGDKPYRIGLDLGVGSIGFAIVSMEENDGNVLLPKEIIMVGSRIFKASAGAADRKLSRGQRNNHRHTRERMRYLWKVLAEQKLALPVPADLDRKENSSEGETSAKRFLGDVLQKDIYELRVKSLDERLSLQELGYVLYHIAGHRGSSAIRTFENDSEEAQKENTENKKIAGNIKRLMAKKNYRTYGEYLYKEFFENKEKHKREKISNAANNHKFSPTRDLVIKEAEAILKKQAGKDGFHKELTEEYIEKLTKAIGYESEKLIPESGFCPYLKDEKRLPASHKLNEERRLWETLNNARYSDPIVDIVTGEITGYYEKQFTKEQKQKLFDYLLTGSELTPAQTKKLLGLKNTNFEDIILQGRDKKAQKIKGYKLIKLESMPFWARLSEAQQDSFLYDWNSCPDEKLLTEKLSNEYHLTEEEIDNAFNEIVLSSSYAPLGKSAMLIILEKIKNDLSYTEAVEEALKEGKLTKEKQAIKDRLPYYGAVLQESTQKIIAKGFSPQFKDKGYKTPHTNKYELEYGRIANPVVHQTLNELRKLVNEIIDILGKKPCEIGLETARELKKSAEDRSKLSREQNDNESNRNRIYEIYIRPQQQVIITRRENPRNYILKFELLEEQKSQCPFCGGQISPNDIINNQADIEHLFPIAESEDNGRNNLVISHSACNADKAKRSPWAAFASAAKDSKYDYNRILSNVKENIPHKAWRFNQGAFEKFIENKPMAARFKTDNSYISKVAHKYLACLFEKPNIICVKGSLTAQLRMAWGLQGLMIPFAKQLITEKESESFNKDVNSNKKIRLDNRHHALDAIVIAYASRGYGNLLNKMAGKDYKINYSERNWLSKILLPPNNIVWENIDADLESFESSVKTALKNAFISVKHDHSDNGELVKGTMYKIFYSERGYTLTTYKKLSALKLTDPQKKKTPKDFLETALLKFKGRESEMKNEKIKSAIENNKRLFDVIQDNLEKAKKLLEEENEKSKAEGKKEKNINDASIYQKAISLSGDKYVQLSKKEPGKFFAISKPTPTTTGYGYDTGDSLCVDLYYDNKGKLCGEIIRKIDAQQKNPLKYKEQGFTLFERIYGGDILEVDFDIHSDKNSFRNNTGSAPENRVFIKVGTFTEITNNNIQIWFGNIIKSTGGQDDSFTINSMQQYNPRKLILSSCGFIKYRSPILKNKEG

SEQ ID NO: 361 - protein, 1082 aa, Neisseria meningitidis; identical to SEQ ID NO: 25

SEQ ID NO: 362 - protein, 1056 aa, Pasteurella multocida
MQTTNLSYILGLDLGIASVGWAVVEINENEDPIGLIDVGVRIFERAEVPKTGESLALSRRLARSTRRLIRRRAHRLLLAKRFLKREGILSTIDLEKGLPNQAWELRVAGLERRLSAIEWGAVLLHLIKHRGYLSKRKNESQTNNKELGALLSGVAQNHQLLQSDDYRTPAELALKKFAKEEGHIRNQRGAYTHTFNRLDLLAELNLLFAQQHQFGNPHCKEHIQQYMTELLMWQKPALSGEAILKMLGKCTHEKNEFKAAKHTYSAERFVWLTKLNNLRILEDGAERALNEEERQLLINHPYEKSKLTYAQVRKLLGLSEQAIFKHLRYSKENAESATFMELKAWHAIRKALENQGLKDTWQDLAKKPDLLDEIGTAFSLYKTDEDIQQYLTNKVPNSVINALLVSLNFDKFIELSLKSLRKILPLMEQGKRYDQACREIYGHHYGEANQKTSQLLPAIPAQEIRNPVVLRTLSQARKVINAIIRQYGSPARVHIETGRELGKSFKERREIQKQQEDNRTKRESAVQKFKELFSDFSSEPKSKDILKFRLYEQQHGKCLYSGKEINIHRLNEKGYVEIDHALPFSRTWDDSFNNKVLVLASENQNKGNQTPYEWLQGKINSERWKNFVALVLGSQCSAAKKQRLLTQVIDDNKFIDRNLNDTRYIARFLSNYIQENLLLVGKNKKNVFTPNGQITALLRSRWGLIKARENNNRHHALDAIVVACATPSMQQKITRFIRFKEVHPYKIENRYEMVDQESGEIISPHFPEPWAYFRQEVNIRVFDNHPDTVLKEMLPDRPQANHQFVQPLFVSRAPTRKMSGQGHMETIKSAKRLAEGISVLRIPLTQLKPNLLENMVNKEREPALYAGLKARLAEFNQDPAKAFATPFYKQGGQQVKAIRVEQVQKSGVLVRENNGVADNASIVRTDVFIKNNKFFLVPIYTWQVAKGILPNKAIVAHKNEDEWEEMDEGAKFKFSLFPNDLVELKTKKEYFFGYYIGLDRATGNISLKEHDGEISKGKDGVYRVGVKLALSFEKYQVDELGKNRQICRPQQRQPVR

SEQ ID NO: 363 - protein, 1059 aa, Rhodovulum sp.
MGIRFAFDLGTNSIGWAVWRTGPGVFGEDTAASLDGSGVLIFKDGRNPKDGQSLATMRRVPRQSRKRRDRFVLRRRDLLAALRKAGLFPVDVEEGRRLAATDPYHLRAKALDESLTPHEMGRVIFHLNQRRGFRSNRKADRQDREKGKIAEGSKRLAETLAATNCRTLGEFLWSRHRGTPRTRSPTRIRMEGEGAKALYAFYPTREMVRAEFERLWTAQSRFAPDLLTPERHEEIAGILFRQRDLAPPKIGCCTFEPSERRLPRALPSVEARGIYERLAHLRITTGPVSDRGLTRPERDVLASALLAGKSLTFKAVRKTLKILPHALVNFEEAGEKGLDGALTAKLLSKPDHYGAAWHGLSFAEKDTFVGKLLDEADEERLIRRLVTENRLSEDAARRCASIPLADGYGRLGRTANTEILAALVEETDETGTVVTYAEAVRRAGERTGRNWHHSDERDGVILDRLPYYGEILQRHVVPGSGEPEEKNEAARWGRLANPTVHIGLNQLRKVVNRLIAAHGRPDQIVVELARELKLNREQKERLDRENRKNREENERRTAILAEHGQRDTAENKIRLRLFEEQARANAGIALCPYTGRAIGIAELFTSEVEIDHILPVSLTLDDSLANRVLCRREANREKRRQTPFQAFGATPAWNDIVARAAKLPPNKRWRFDPAALERFEREGGFLGRQLNETKYLSRLAKIYLGKICDPDRVYVTPGTLTGLLRARWGLNSILSDSNFKNRSDHRHHAVDAVVIGVLTRGMIQRIAHDAARAEDQDLDRVFRDVPVPFEDFRDHVRERVSTITVAVKPEHGKGGALHEDTSYGLVPDTDPNAALGNLVVRKPIRSLTAGEVDRVRDRALRARLGALAAPFRDESGRVRDAKGLAQALEAFGAENGIRRVRILKPDASVVTIADRRTGVPYRAVAPGENHHVDIVQMRDGSWRGFAASVFEVNRPGWRPEWEVKKLGGKLVMRLHKGDMVELSDKDGQRRVKVVQQIEISANRVRLSPHNDGGKLQDRHADADDPFRWDLATIPLLKDRGCVAVRVDPIGVVTLRRSNV

SEQ ID NO: 364 - protein, 1096 aa, Eubacterium dolichum
MMEVFMGRLVLGLDIGITSVGFGIIDLDESEIVDYGVRLFKEGTAAENETRRTKRGGRRLKRRRVTRREDMLHLLKQAGIISTSFHPLNNPYDVRVKGLNERLNGEELATALLHLCKHRGSSVETIEDDEAKAKEAGETKKVLSMNDQLLKSGKYVCEIQKERLRTNGHIRGHENNFKTRAYVDEAFQILSHQDLSNELKSAIITIISRKRMYYDGPGGPLSPTPYGRYTYFGQKEPIDLIEKMRGKCSLFPNEPRAPKLAYSAELFNLLNDLNNLSIEGEKLTSEQKAMILKIVHEKGKITPKQLAKEVGVSLEQIRGFRIDTKGSPLLSELTGYKMIREVLEKSNDEHLEDHVFYDEIAEILTKTKDIEGRKKQISELSSDLNEESVHQLAGLTKFTAYHSLSFKALRLINEEMLKTELNQMQSITLFGLKQNNELSVKGMKNIQADDTAILSPVAKRAQRETFKVVNRLREIYGEFDSIVVEMAREKNSEEQRKAIRERQKFFEMRNKQVADIIGDDRKINAKLREKLVLYQEQDGKTAYSLEPIDLKLLIDDPNAYEVDHIIPISISLDDSITNKVLVTHRENQEKGNLTPISAFVKGRFTKGSLAQYKAYCLKLKEKNIKTNKGYRKKVEQYLLNENDIYKYDIQKEFINRNLVDTSYASRVVLNTLTTYFKQNEIPTKVFTVKGSLTNAFRRKINLKKDRDEDYGHHAIDALIIASMPKMRLLSTIFSRYKIEDIYDESTGEVFSSGDDSMYYDDRYFAFIASLKAIKVRKFSHKIDTKPNRSVADETIYSTRVIDGKEKVVKKYKDIYDPKFTALAEDILNNAYQEKYLMALHDPQTFDQIVKVVNYYFEEMSKSEKYFTKDKKGRIKISGMNPLSLYRDEHGMLKKYSKKGDGPAITQMKYFDGVLGNHIDISAHYQVRDKKVVLQQISPYRTDFYYSKENGYKFVTIRYKDVRWSEKKKKYVIDQQDYAMKKAEKKIDDTYEFQFSMHRDELIGITKAEGEALIYPDETWHNFNFFFHAGETPEILKFTATNNDKSNKIEVKPIHCYCKMRLMPTISKKIVRIDKYATDVVGNLYKVKKNTLKFEFD

SEQ ID NO: 365 - protein, 1132 aa, Nitratifractor salsuginis
MKKILGVDLGITSFGYAILQETGKDLYRCLDNSVVMRNNPYDEKSGESSQSIRSTQKSMRRLIEKRKKRIRCVAQTMERYGILDYSETMKINDPKNNPIKNRWQLRAVDAWKRPLSPQELFAIFAHMAKHRGYKSIATEDLIYELELELGLNDPEKESEKKADERRQVYNALRHLEELRKKYGGETIAQTIHRAVEAGDLRSYRNHDDYEKMIRREDIEEEIEKVLLRQAELGALGLPEEQVSELIDELKACITDQEMPTIDESLFGKCTFYKDELAAPAYSYLYDLYRLYKKLADLNIDGYEVTQEDREKVIEWVEKKIAQGKNLKKITHKDLRKILGLAPEQKIFGVEDERIVKGKKEPRTFVPFFFLADIAKFKELFASIQKHPDALQIFRELAEILQRSKTPQEALDRLRALMAGKGIDTDDRELLELFKNKRSGTRELSHRYILEALPLFLEGYDEKEVQRILGFDDREDYSRYPKSLRHLHLREGNLFEKEENPINNHAVKSLASWALGLIADLSWRYGPFDEIILETTRDALPEKIRKEIDKAMREREKALDKIIGKYKKEFPSIDKRLARKIQLWERQKGLDLYSGKVINLSQLLDGSADIEHIVPQSLGGLSTDYNTIVTLKSVNAAKGNRLPGDWLAGNPDYRERIGMLSEKGLIDWKKRKNLLAQSLDEIYTENTHSKGIRATSYLEALVAQVLKRYYPFPDPELRKNGIGVRMIPGKVTSKTRSLLGIKSKSRETNFHHAEDALILSTLTRGWQNRLHRMLRDNYGKSEAELKELWKKYMPHIEGLTLADYIDEAFRRFMSKGEESLFYRDMFDTIRSISYWVDKKPLSASSHKETVYSSRHEVPTLRKNILEAFDSLNVIKDRHKLTTEEFMKRYDKEIRQKLWLHRIGNTNDESYRAVEERATQIAQILTRYQLMDAQNDKEIDEKFQQALKELITSPIEVTGKLLRKMRFVYDKLNAMQIDRGLVETDKNMLGIHISKGPNEKLIFRRMDVNNAHELQKERSGILCYLNEMLFIFNKKGLIHYGCLRSYLEKGQGSKYIALFNPRFPANPKAQPSKFTSDSKIKQVGIGSATGIIKAHLDLDGHVRSYEVFGTLPEGSIEWFKEESGYGRVEDDPHH

SEQ ID NO: 366 - protein, 1173 aa, Rhodospirillum rubrum
MRPIEPWILGLDIGTDSLGWAVFSCEEKGPPTAKELLGGGVRLFDSGRDAKDHTSRQAERGAFRRARRQTRTWPWRRDRLIALFQAAGLTPPAAETRQIALALRREAVSRPLAPDALWAALLHLAHHRGFRSNRIDKRERAAAKALAKAKPAKATAKATAPAKEADDEAGFWEGAEAALRQRMAASGAPTVGALLADDLDRGQPVRMRYNQSDRDGVVAPTRALIAEELAEIVARQSSAYPGLDWPAVTRLVLDQRPLRSKGAGPCAFLPGEDRALRALPTVQDFIIRQTLANLRLPSTSADEPRPLTDEEHAKALALLSTARFVEWPALRRALGLKRGVKFTAETERNGAKQAARGTAGNLTEAILAPLIPGWSGWDLDRKDRVFSDLWAARQDRSALLALIGDPRGPTRVTEDETAEAVADAIQIVLPTGRASLSAKAARAIAQAMAPGIGYDEAVTLALGLHHSHRPRQERLARLPYYAAALPDVGLDGDPVGPPPAEDDGAAAEAYYGRIGNISVHIALNETRKIVNALLHRHGPILRLVMVETTRELKAGADERKRMIAEQAERERENAEIDVELRKSDRWMANARERRQRVRLARRQNNLCPYTSTPIGHADLLGDAYDIDHVIPLARGGRDSLDNMVLCQSDANKTKGDKTPWEAFHDKPGWIAQRDDFLARLDPQTAKALAWRFADDAGERVARKSAEDEDQGFLPRQLTDTGYIARVALRYLSLVTNEPNAVVATNGRLTGLLRLAWDITPGPAPRDLLPTPRDALRDDTAARRFLDGLTPPPLAKAVEGAVQARLAALGRSRVADAGLADALGLTLASLGGGGKNRADHRHHFIDAAMIAVTTRGLINQINQASGAGRILDLRKWPRTNFEPPYPTFRAEVMKQWDHIHPSIRPAHRDGGSLHAATVFGVRNRPDARVLVQRKPVEKLFLDANAKPLPADKIAEIIDGFASPRMAKRFKALLARYQAAHPEVPPALAALAVARDPAFGPRGMTANTVIAGRSDGDGEDAGLITPFRANPKAAVRTMGNAVYEVWEIQVKGRPRWTHRVLTRFDRTQPAPPPPPENARLVMRLRRGDLVYWPLESGDRLFLVKKMAVDGRLALWPARLATGKATALYAQLSCPNINLNGDQGYCVQSAEGIRKEKIRTTSCTALGRLRLSKKAT

SEQ ID NO: 367 - protein, 1021 aa, Clostridium cellulolyticum
MKYTLGLDVGIASVGWAVIDKDNNKIIDLGVRCFDKAEESKTGESLATARRIARGMRRRISRRSQRLRLVKKLFVQYEIIKDSSEFNRIFDTSRDGWKDPWELRYNALSRILKPYELVQVLTHITKRRGFKSNRKEDLSTTKEGVVITSIKNNSEMLRTKNYRTIGEMIFMETPENSNKRNKVDEYIHTIAREDLLNEIKYIFSIQRKLGSPFVTEKLEHDFLNIWEFQRPFASGDSILSKVGKCTLLKEELRAPTSCYTSEYFGLLQSINNLVLVEDNNTLTLNNDQRAKIIEYAHFKNEIKYSEIRKLLDIEPEILFKAHNLTHKNPSGNNESKKFYEMKSYHKLKSTLPTDIWGKLHSNKESLDNLFYCLTVYKNDNEIKDYLQANNLDYLIEYIAKLPTFNKFKHLSLVAMKRIIPFMEKGYKYSDACNMAELDFTGSSKLEKCNKLTVEPIIENVTNPVVIRALTQARKVINAIIQKYGLPYMVNIELAREAGMTRQDRDNLKKEHENNRKAREKISDLIRQNGRVASGLDILKWRLWEDQGGRCAYSGKPIPVCDLLNDSLTQIDHIYPYSRSMDDSYMNKVLVLTDENQNKRSYTPYEVWGSTEKWEDFEARIYSMHLPQSKEKRLLNRNFITKDLDSFISRNLNDTRYISRFLKNYIESYLQFSNDSPKSCVVCVNGQCTAQLRSRWGLNKNREESDLHHALDAAVIACADRKIIKEITNYYNERENHNYKVKYPLPWHSFRQDLMETLAGVFISRAPRRKITGPAHDETIRSPKHFNKGLTSVKIPLTTVTLEKLETMVKNTKGGISDKAVYNVLKNRLIEHNNKPLKAFAEKIYKPLKNGTNGAIIRSIRVETPSYTGVFRNEGKGISDNSLMVRVDVFKKKDKYYLVPIYVAHMIKKELPSKAIVPLKPESQWELIDSTHEFLFSLYQNDYLVIKTKKGITEGYYRSCHRGTGSLSLMPHFANNKNVKIDIGVRTAISIEKYNVDILGNKSIVKGEPRRGMEKYNSFKSN

SEQ ID NO: 368 - protein, 1024 aa, Helicobacter mustelae
MIRTLGIDIGIASIGWAVIEGEYTDKGLENKEIVASGVRVFTKAENPKNKESLALPRTLARSARRRNARKKGRIQQVKHYLSKALGLDLECFVQGEKLATLFQTSKDFLSPWELRERALYRVLDKEELARVILHIAKRRGYDDITYGVEDNDSGKIKKAIAENSKRIKEEQCKTIGEMMYKLYFQKSLNVRNKKESYNRCVGRSELREELKTIFQIQQELKSPWVNEELIYKLLGNPDAQSKQEREGLIFYQRPLKGFGDKIGKCSHIKKGENSPYRACKHAPSAEEFVALTKSINFLKNLTNRHGLCFSQEDMCVYLGKILQEAQKNEKGLTYSKLKLLLDLPSDFEFLGLDYSGKNPEKAVFLSLPSTFKLNKITQDRKTQDKIANILGANKDWEAILKELESLQLSKEQIQTIKDAKLNFSKHINLSLEALYHLLPLMREGKRYDEGVEILQERGIFSKPQPKNRQLLPPLSELAKEESYFDIPNPVLRRALSEFRKVVNALLEKYGGFHYFHIELTRDVCKAKSARMQLEKINKKNKSENDAASQLLEVLGLPNTYNNRLKCKLWKQQEEYCLYSGEKITIDHLKDQRALQIDHAFPLSRSLDDSQSNKVLCLTSSNQEKSNKTPYEWLGSDEKKWDMYVGRVYSSNFSPSKKRKLTQKNFKERNEEDFLARNLVDTGYIGRVTKEYIKHSLSFLPLPDGKKEHIRIISGSMTSTMRSFWGVQEKNRDHHLHHAQDAIIIACIEPSMIQKYTTYLKDKETHRLKSHQKAQILREGDHKLSLRWPMSNFKDKIQESIQNIIPSHHVSHKVTGELHQETVRTKEFYYQAFGGEEGVKKALKFGKIREINQGIVDNGAMVRVDIFKSKDKGKFYAVPIYTYDFAIGKLPNKAIVQGKKNGIIKDWLEMDENYEFCFSLFKNDCIKIQTKEMQEAVLAIYKSTNSAKATIELEHLSKYALKNEDEEKMFTDTDKEKNKTMTRESCGIQGLKVFQKVKLSVLGEVLEHKPRNRQNIALKTTPKHV

SEQ ID NO: 369 - protein, 1092 aa, Ilyobacter polytropus
MKYSIGLDIGIASVGWSVINKDKERIEDMGVRIFQKAENPKDGSSLASSRREKRGSRRRNRRKKHRLDRIKNILCESGLVKKNEIEKIYKNAYLKSPWELRAKSLEAKISNKEIAQILLHIAKRRGFKSFRKTDRNADDTGKLLSGIQENKKIMEEKGYLTIGDMVAKDPKFNTHVRNKAGSYLFSFSRKLLEDEVRKIQAKQKELGNTHFTDDVLEKYIEVFNSQRNFDEGPSKPSPYYSEIGQIAKMIGNCTFESSEKRTAKNTWSGERFVFLQKLNNFRIVGLSGKRPLTEEERDIVEKEVYLKKEVRYEKLRKILYLKEEERFGDLNYSKDEKQDKKTEKTKFISLIGNYTIKKLNLSEKLKSEIEEDKSKLDKIIEILTFNKSDKTIESNLKKLELSREDIEILLSEEFSGTLNLSLKAIKKILPYLEKGLSYNEACEKADYDYKNNGIKFKRGELLPVVDKDLIANPVVLRAISQTRKVVNAIIRKYGTPHTIHVEVARDLAKSYDDRQTIIKENKKRELENEKTKKFISEEFGIKNVKGKLLLKYRLYQEQEGRCAYSRKELSLSEVILDESMTDIDHIIPYSRSMDDSYSNKVLVLSGENRKKSNLLPKEYFDRQGRDWDTFVLNVKAMKIHPRKKSNLLKEKFTREDNKDWKSRALNDTRYISRFVANYLENALEYRDDSPKKRVFMIPGQLTAQLRARWRLNKVRENGDLHHALDAAVVAVTDQKAINNISNISRYKELKNCKDVIPSIEYHADEETGEVYFEEVKDTRFPMPWSGFDLELQKRLESENPREEFYNLLSDKRYLGWFNYEEGFIEKLRPVFVSRMPNRGVKGQAHQETIRSSKKISNQIAVSKKPLNSIKLKDLEKMQGRDTDRKLYEALKNRLEEYDDKPEKAFAEPFYKPTNSGKRGPLVRGIKVEEKQNVGVYVNGGQASNGSMVRIDVFRKNGKFYTVPIYVHQTLLKELPNRAINGKPYKDWDLIDGSFEFLYSFYPNDLIEIEFGKSKSIKNDNKLTKTEIPEVNLSEVLGYYRGMDTSTGAATIDTQDGKIQMRIGIKTVKNIKKYQVDVLGNVYKVKREKRQTF

SEQ ID NO: 370 - protein, 1179 aa, Sphaerochaeta globus
MSKKVSRRYEEQAQEICQRLGSRPYSIGLDLGVGSIGVAVAAYDPIKKQPSDLVFVSSRIFIPSTGAAERRQKRGQRNSLRHRANRLKFLWKLLAERNLMLSYSEQDVPDPARLRFEDAVVRANPYELRLKGLNEQLTLSELGYALYHIANHRGSSSVRTFLDEEKSSDDKKLEEQQAMTEQLAKEKGISTFIEVLTAFNTNGLIGYRNSESVKSKGVPVPTRDIISNEIDVLLQTQKQFYQEILSDEYCDRIVSAILFENEKIVPEAGCCPYFPDEKKLPRCHFLNEERRLWEAINNARIKMPMQEGAAKRYQSASFSDEQRHILFHIARSGTDITPKLVQKEFPALKTSIIVLQGKEKAIQKIAGFRFRRLEEKSFWKRLSEEQKDDFFSAWTNTPDDKRLSKYLMKHLLLTENEVVDALKTVSLIGDYGPIGKTATQLLMKHLEDGLTYTEALERGMETGEFQELSVWEQQSLLPYYGQILTGSTQALMGKYWHSAFKEKRDSEGFFKPNTNSDEEKYGRIANPVVHQTLNELRKLMNELITILGAKPQEITVELARELKVGAEKREDIIKQQTKQEKEAVLAYSKYCEPNNLDKRYIERFRLLEDQAFVCPYCLEHISVADIAAGRADVDHIFPRDDTADNSYGNKVVAHRQCNDIKGKRTPYAAFSNTSAWGPIMHYLDETPGMWRKRRKFETNEEEYAKYLQSKGFVSRFESDNSYIAKAAKEYLRCLFNPNNVTAVGSLKGMETSILRKAWNLQGIDDLLGSRHWSKDADTSPTMRKNRDDNRHHGLDAIVALYCSRSLVQMINTMSEQGKRAVEIEAMIPIPGYASEPNLSFEAQRELFRKKILEFMDLHAFVSMKTDNDANGALLKDTVYSILGADTQGEDLVFVVKKKIKDIGVKIGDYEEVASAIRGRITDKQPKWYPMEMKDKIEQLQSKNEAALQKYKESLVQAAAVLEESNRKLIESGKKPIQLSEKTISKKALELVGGYYYLISNNKRTKTFVVKEPSNEVKGFAFDTGSNLCLDFYHDAQGKLCGEIIRKIQAMNPSYKPAYMKQGYSLYVRLYQGDVCELRASDLTEAESNLAKTTHVRLPNAKPGRTFVIIITFTEMGSGYQIYFSNLAKSKKGQDTSFTLTTIKNYDVRKVQLSSAGLVRYVSPLLVDKIEKDEVALCGE

SEQ ID NO: 371 - protein, 1054 aa, Staphylococcus lugdunensis
MNQKFILGLDIGITSVGYGLIDYETKNIIDAGVRLFPEANVENNEGRRSKRGSRRLKRRRIHRLERVKKLLEDYNLLDQSQIPQSTNPYAIRVKGLSEALSKDELVIALLHIAKRRGIHKIDVIDSNDDVGNELSTKEQLNKNSKLLKDKFVCQIQLERMNEGQVRGEKNRFKTADIIKEIIQLLNVQKNFHQLDENFINKYIELVEMRREYFEGPGKGSPYGWEGDPKAWYETLMGHCTYFPDELRSVKYAYSADLFNALNDLNNLVIQRDGLSKLEYHEKYHIIENVFKQKKKPTLKQIANEINVNPEDIKGYRITKSGKPQFTEFKLYHDLKSVLFDQSILENEDVLDQIAEILTIYQDKDSIKSKLTELDILLNEEDKENIAQLTGYTGTHRLSLKCIRLVLEEQWYSSRNQMEIFTHLNIKPKKINLTAANKIPKAMIDEFILSPVVKRTFGQAINLINKIIEKYGVPEDIIIELARENNSKDKQKFINEMQKKNENTRKRINEIIGKYGNQNAKRLVEKIRLHDEQEGKCLYSLESIPLEDLLNNPNHYEVDHIIPRSVSFDNSYHNKVLVKQSENSKKSNLTPYQYFNSGKSKLSYNQFKQHILNLSKSQDRISKKKKEYLLEERDINKFEVQKEFINRNLVDTRYATRELTNYLKAYFSANNMNVKVKTINGSFTDYLRKVWKFKKERNHGYKHHAEDALIIANADFLFKENKKLKAVNSVLEKPEIESKQLDIQVDSEDNYSEMFIIPKQVQDIKDFRNFKYSHRVDKKPNRQLINDTLYSTRKKDNSTYIVQTIKDIYAKDNTTLKKQFDKSPEKFLMYQHDPRTFEKLEVIMKQYANEKNPLAKYHEETGEYLTKYSKKNNGPIVKSLKYIGNKLGSHLDVTHQFKSSTKKLVKLSIKPYRFDVYLTDKGYKFITISYLDVLKKDNYYYIPEQKYDKLKLGKAIDKNAKFIASFYKNDLIKLDGEIYKIIGVNSDTRNMIELDLPDIRYKEYCELNNIKGEPRIKKTIGKKVNSIEKLTTDVLGNVFTNTQYTKPQLLFKRGN

SEQ ID NO: 372 - protein, 1061 aa, Treponema sp.
MIMKLEKWRLGLDLGTNSIGWSVFSLDKDNSVQDLIDMGVRIFSDGRDPKTKEPLAVARRTARSQRKLIYRRKLRRKQVFKFLQEQGLFPKTKEECMTLKSLNPYELRIKALDEKLEPYELGRALFNLAVRRGFKSNRKDGSREEVSEKKSPDEIKTQADMQTHLEKAIKENGCRTITEFLYKNQGENGGIRFAPGRMTYYPTRKMYEEEFNLIRSKQEKYYPQVDWDDIYKAIFYQRPLKPQQRGYCIYENDKERTFKAMPCSQKLRILQDIGNLAYYEGGSKKRVELNDNQDKVLYELLNSKDKVTFDQMRKALCLADSNSFNLEENRDFLIGNPTAVKMRSKNRFGKLWDEIPLEEQDLIIETIITADEDDAVYEVIKKYDLTQEQRDFIVKNTILQSGTSMLCKEVSEKLVKRLEEIADLKYHEAVESLGYKFADQTVEKYDLLPYYGKVLPGSTMEIDLSAPETNPEKHYGKISNPTVHVALNQTRVVVNALIKEYGKPSQIAIELSRDLKNNVEKKAEIARKQNQRAKENIAINDTISALYHTAFPGKSFYPNRNDRMKYRLWSELGLGNKCIYCGKGISGAELFTKEIEIEHILPFSRTLLDAESNLTVAHSSCNAFKAERSPFEAFGTNPSGYSWQEIIQRANQLKNTSKKNKFSPNAMDSFEKDSSFIARQLSDNQYIAKAALRYLKCLVENPSDVWTTNGSMTKLLRDKWEMDSILCRKFTEKEVALLGLKPEQIGNYKKNRFDHRHHAIDAVVIGLTDRSMVQKLATKNSHKGNRIEIPEFPILRSDLIEKVKNIVVSFKPDHGAEGKLSKETLLGKIKLHGKETFVCRENIVSLSEKNLDDIVDEIKSKVKDYVAKHKGQKIEAVLSDFSKENGIKKVRCVNRVQTPIEITSGKISRYLSPEDYFAAVIWEIPGEKKTFKAQYIRRNEVEKNSKGLNVVKPAVLENGKPHPAAKQVCLLHKDDYLEFSDKGKMYFCRIAGYAATNNKLDIRPVYAVSYCADWINSTNETMLTGYWKPTPTQNWVSVNVLFDKQKARLVTVSPIGRVFRK

SEQ ID NO: 373 - protein, 1011 aa, Unknown
  source: /note="Description of Unknown: Uncultured delta polypeptide"
MSSKAIDSLEQLDLFKPQEYTLGLDLGIKSIGWAILSGERIANAGVYLFETAEELNSTGNKLISKAAERGRKRRIRRMLDRKARRGRHIRYLLEREGLPTDELEEVVVHQSNRTLWDVRAEAVERKLTKQELAAVLFHLVRHRGYFPNTKKLPPDDESDSADEEQGKINRATSRLREELKASDCKTIGQFLAQNRDRQRNREGDYSNLMARKLVFEEALQILAFQRKQGHELSKDFEKTYLDVLMGQRSGRSPKLGNCSLIPSELRAPSSAPSTEWFKFLQNLGNLQISNAYREEWSIDAPRRAQIIDACSQRSTSSYWQIRRDFQIPDEYRFNLVNYERRDPDVDLQEYLQQQERKTLANFRNWKQLEKIIGTGHPIQTLDEAARLITLIKDDEKLSDQLADLLPEASDKAITQLCELDFTTAAKISLEAMYRILPHMNQGMGFFDACQQESLPEIGVPPAGDRVPPFDEMYNPVVNRVLSQSRKLINAVIDEYGMPAKIRVELARDLGKGRELRERIKLDQLDKSKQNDQRAEDFRAEFQQAPRGDQSLRYRLWKEQNCTCPYSGRMIPVNSVLSEDTQIDHILPISQSFDNSLSNKVLCFTEENAQKSNRTPFEYLDAADFQRLEAISGNWPEAKRNKLLHKSFGKVAEEWKSRALNDTRYLTSALADHLRHHLPDSKIQTVNGRITGYLRKQWGLEKDRDKHTHHAVDAIVVACTTPAIVQQVTLYHQDIRRYKKLGEKRPTPWPETFRQDVLDVEEEIFITRQPKKVSGGIQTKDTLRKHRSKPDRQRVALTKVKLADLERLVEKDASNRNLYEHLKQCLEESGDQPTKAFKAPFYMPSGPEAKQRPILSKVTLLREKPEPPKQLTELSGGRRYDSMAQGRLDIYRYKPGGKRKDEYRVVLQRMIDLMRGEENVHVFQKGVPYDQGPEIEQNYTFLFSLYFDDLVEFQRSADSEVIRGYYRTFNIANGQLKISTYLEGRQDFDFFGANRLAHFAKVQVNLLGKVIK

SEQ ID NO: 374 - protein, 1029 aa, Alicycliphilus denitrificans
MRSLRYRLALDLGSTSLGWALFRLDACNRPTAVIKAGVRIFSDGRNPKDGSSLAVTRRAARAMRRRRDRLLKRKTRMQAKLVEHGFFPADAGKRKALEQLNPYALRAKGLQEALLPGEFARALFHINQRRGFKSNRKTDKKDNDSGVLKKAIGQLRQQMAEQGSRTVGEYLWTRLQQGQGVRARYREKPYTTEEGKKRIDKSYDLYIDRAMIEQEFDALWAAQAAFNPTLFHEAARADLKDTLLHQRPLRPVKPGRCTLLPEEERAPLALPSTQRFRIHQEVNHLRLLDENLREVALTLAQRDAVVTALETKAKLSFEQIRKLLKLSGSVQFNLEDAKRTELKGNATSAALARKELFGAAWSGFDEALQDEIVWQLVTEEGEGALIAWLQTHTGVDEARAQAIVDVSLPEGYGNLSRKALARIVPALRAAVITYDKAVQAAGFDHHSQLGFEYDASEVEDLVHPETGEIRSVFKQLPYYGKALQRHVAFGSGKPEDPDEKRYGKIANPTVHIGLNQVRMVVNALIRRYGRPTEVVIELARDLKQSREQKVEAQRRQADNQRRNARIRRSIAEVLGIGEERVRGSDIQKWICWEELSFDAADRRCPYSGVQISAAMLLSDEVEVEHILPFSKTLDDSLNNRTVAMRQANRIKRNRTPWDARAEFEAQGWSYEDILQRAERMPLRKRYRFAPDGYERWLGDDKDFLARALNDTRYLSRVAAEYLRLVCPGTRVIPGQLTALLRGKFGLNDVLGLDGEKNRNDHRHHAVDACVIGVTDQGLMQRFATASAQARGDGLTRLVDGMPMPWPTYRDHVERAVRHIWVSHRPDHGFEGAMMEETSYGIRKDGSIKQRRKADGSAGREISNLIRIHEATQPLRHGVSADGQPLAYKGYVGGSNYCIEITVNDKGKWEGEVISTFRAYGVVRAGGMGRLRNPHEGQNGRKLIMRLVIGDSVRLEVDGAERTMRIVKISGSNGQIFMAPIHEANVDARNTDKQDAFTYTSKYAGSLQKAKTRRVTISPIGEVRDPGFKG

SEQ ID NO: 375 - protein, 1168 aa, Azospirillum sp.
MARPAFRAPRREHVNGWTPDPHRISKPFFILVSWHLLSRVVIDSSSGCFPGTSRDHTDKFAEWECAVQPYRLSFDLGTNSIGWGLLNLDRQGKPREIRALGSRIFSDGRDPQDKASLAVARRLARQMRRRRDRYLTRRTRLMGALVRFGLMPADPAARKRLEVAVDPYLARERATRERLEPFEIGRALFHLNQRRGYKPVRTATKPDEEAGKVKEAVERLEAAIAAAGAPTLGAWFAWRKTRGETLRARLAGKGKEAAYPFYPARRMLEAEFDTLWAEQARHHPDLLTAEAREILRHRIFHQRPLKPPPVGRCTLYPDDGRAPRALPSAQRLRLFQELASLRVIHLDLSERPLTPAERDRIVAFVQGRPPKAGRKPGKVQKSVPFEKLRGLLELPPGTGFSLESDKRPELLGDETGARIAPAFGPGWTALPLEEQDALVELLLTEAEPERAIAALTARWALDEATAAKLAGATLPDFHGRYGRRAVAELLPVLERETRGDPDGRVRPIRLDEAVKLLRGGKDHSDFSREGALLDALPYYGAVLERHVAFGTGNPADPEEKRVGRVANPTVHIALNQLRHLVNAILARHGRPEEIVIELARDLKRSAEDRRREDKRQADNQKRNEERKRLILSLGERPTPRNLLKLRLWEEQGPVENRRCPYSGETISMRMLLSEQVDIDHILPFSVSLDDSAANKVVCLREANRIKRNRSPWEAFGHDSERWAGILARAEALPKNKRWRFAPDALEKLEGEGGLRARHLNDTRHLSRLAVEYLRCVCPKVRVSPGRLTALLRRRWGIDAILAEADGPPPEVPAETLDPSPAEKNRADHRHHALDAVVIGCIDRSMVQRVQLAAASAEREAAAREDNIRRVLEGFKEEPWDGFRAELERRARTIVVSHRPEHGIGGALHKETAYGPVDPPEEGFNLVVRKPIDGLSKDEINSVRDPRLRRALIDRLAIRRRDANDPATALAKAAEDLAAQPASRGIRRVRVLKKESNPIRVEHGGNPSGPRSGGPFHKLLLAGEVHHVDVALRADGRRWVGHWVTLFEAHGGRGADGAAAPPRLGDGERFLMRLHKGDCLKLEHKGRVRVMQVVKLEPSSNSVVVVEPHQVKTDRSKHVKISCDQLRARGARRVTVDPLGRVRVHAPGARVGIGGDAGRTAMEPAEDIS

SEQ ID NO: 376 - protein, 1064 aa, Bradyrhizobium sp.
MKRTSLRAYRLGVDLGANSLGWFVVWLDDHGQPEGLGPGGVRIFPDGRNPQSKQSNAAGRRLARSARRRRDRYLQRRGKLMGLLVKHGLMPADEPARKRLECLDPYGLRAKALDEVLPLHHVGRALFHLNQRRGLFANRAIEQGDKDASAIKAAAGRLQTSMQACGARTLGEFLNRRHQLRATVRARSPVGGDVQARYEFYPTRAMVDAEFEAIWAAQAPHHPTMTAEAHDTIREAIFSQRAMKRPSIGKCSLDPATSQDDVDGFRCAWSHPLAQRFRIWQDVRNLAVVETGPTSSRLGKEDQDKVARALLQTDQLSFDEIRGLLGLPSDARFNLESDRRDHLKGDATGAILSARRHFGPAWHDRSLDRQIDIVALLESALDEAAIIASLGTTHSLDEAAAQRALSALLPDGYCRLGLRAIKRVLPLMEAGRTYAEAASAAGYDHALLPGGKLSPTGYLPYYGQWLQNDVVGSDDERDTNERRWGRLPNPTVHIGIGQLRRVVNELIRWHGPPAEITVELTRDLKLSPRRLAELEREQAENQRKNDKRTSLLRKLGLPASTHNLLKLRLWDEQGDVASECPYTGEAIGLERLVSDDVDIDHLIPFSISWDDSAANKVVCMRYANREKGNRTPFEAFGHRQGRPYDWADIAERAARLPRGKRWRFGPGARAQFEELGDFQARLLNETSWLARVAKQYLAAVTHPHRIHVLPGRLTALLRATWELNDLLPGSDDRAAKSRKDHRHHAIDALVAALTDQALLRRMANAHDDTRRKIEVLLPWPTFRIDLETRLKAMLVSHKPDHGLQARLHEDTAYGTVEHPETEDGANLVYRKTFVDISEKEIDRIRDRRLRDLVRAHVAGERQQGKTLKAAVLSFAQRRDIAGHPNGIRHVRLTKSIKPDYLVPIRDKAGRIYKSYNAGENAFVDILQAESGRWIARATTVFQANQANESHDAPAAQPIMRVFKGDMLRIDHAGAEKFVKIVRLSPSNNLLYLVEHHQAGVFQTRHDDPEDSFRWLFASFDKLREWNAELVRIDTLGQPWRRKRGLETGSEDATRIGWTRPKKWP

SEQ ID NO: 377 - protein, 1037 aa, Parvibaculum lavamentivorans
MERIFGFDIGTTSIGFSVIDYSSTQSAGNIQRLGVRIFPEARDPDGTPLNQQRRQKRMMRRQLRRRRIRRKALNETLHEAGFLPAYGSADWPVVMADEPYELRRRGLEEGLSAYEFGRAIYHLAQHRHFKGRELEESDTPDPDVDDEKEAANERAATLKALKNEQTTLGAWLARRPPSDRKRGIHAHRNVVAEEFERLWEVQSKFHPALKSEEMRARISDTIFAQRPVFWRKNTLGECRFMPGEPLCPKGSWLSQQRRMLEKLNNLAIAGGNARPLDAEERDAILSKLQQQASMSWPGVRSALKALYKQRGEPGAEKSLKFNLELGGESKLLGNALEAKLADMFGPDWPAHPRKQEIRHAVHERLWAADYGETPDKKRVIILSEKDRKAHREAAANSFVADFGITGEQAAQLQALKLPTGWEPYSIPALNLFLAELEKGERFGALVNGPDWEGWRRTNFPHRNQPTGEILDKLPSPASKEERERISQLRNPTVVRTQNELRKVVNNLIGLYGKPDRIRIEVGRDVGKSKREREEIQSGIRRNEKQRKKATEDLIKNGIANPSRDDVEKWILWKEGQERCPYTGDQIGFNALFREGRYEVEHIWPRSRSFDNSPRNKTLCRKDVNIEKGNRMPFEAFGHDEDRWSAIQIRLQGMVSAKGGTGMSPGKVKRFLAKTMPEDFAARQLNDTRYAAKQILAQLKRLWPDMGPEAPVKVEAVTGQVTAQLRKLWTLNNILADDGEKTRADHRHHAIDALTVACTHPGMTNKLSRYWQLRDDPRAEKPALTPPWDTIRADAEKAVSEIVVSHRVRKKVSGPLHKETTYGDTGTDIKTKSGTYRQFVTRKKIESLSKGELDEIRDPRIKEIVAAHVAGRGGDPKKAFPPYPCVSPGGPEIRKVRLTSKQQLNLMAQTGNGYADLGSNHHIAIYRLPDGKADFEIVSLFDASRRLAQRNPIVQRTRADGASFVMSLAAGEAIMIPEGSKKGIWIVQGVWASGQVVLERDTDADHSTTTRPMPNPILKDDAKKVSIDPIGRVRPSND

SEQ ID NO: 378 - protein, 1218 aa, Prevotella timonensis
MNKRILGLDTGTNSLGWAVVDWDEHAQSYELIKYGDVIFQEGVKIEKGIESSKAAERSGYKAIRKQYFRRRLRKIQVLKVLVKYHLCPYLSDDDLRQWHLQKQYPKSDELMLWQRTSDEEGKNPYYDRHRCLHEKLDLTVEADRYTLGRALYHLTQRRGFLSNRLDTSADNKEDGVVKSGISQLSTEMEEAGCEYLGDYFYKLYDAQGNKVRIRQRYTDRNKHYQHEFDAICEKQELSSELIEDLQRAIFFQLPLKSQRHGVGRCTFERGKPRCADSHPDYEEFRMLCFVNNIQVKGPHDLELRPLTYEEREKIEPLFFRKSKPNFDFEDIAKALAGKKNYAWIHDKEERAYKFNYRMTQGVPGCPTIAQLKSIFGDDWKTGIAETYTLIQKKNGSKSLQEMVDDVWNVLYSFSSVEKLKEFAHHKLQLDEESAEKFAKIKLSHSFAALSLKAIRKFLPFLRKGMYYTHASFFANIPTIVGKEIWNKEQNRKYIMENVGELVFNYQPKHREVQGTIEMLIKDFLANNFELPAGATDKLYHPSMIETYPNAQRNEFGILQLGSPRTNAIRNPMAMRSLHILRRVVNQLLKESIIDENTEVHVEYARELNDANKRRAIADRQKEQDKQHKKYGDEIRKLYKEETGKDIEPTQTDVLKFQLWEEQNHHCLYTGEQIGITDFIGSNPKFDIEHTIPQSVGGDSTQMNLTLCDNRFNREVKKAKLPTELANHEEILTRIEPWKNKYEQLVKERDKQRTFAGMDKAVKDIRIQKRHKLQMEIDYWRGKYERFTMTEVPEGFSRRQGTGIGLISRYAGLYLKSLFHQADSRNKSNVYVVKGVATAEFRKMWGLQSEYEKKCRDNHSHHCMDAITIACIGKREYDLMAEYYRMEETFKQGRGSKPKFSKPWATFTEDVLNIYKNLLVVHDTPNNMPKHTKKYVQTSIGKVLAQGDTARGSLHLDTYYGAIERDGEIRYVVRRPLSSFTKPEELENIVDETVKRTIKEAIADKNFKQAIAEPIYMNEEKGILIKKVRCFAKSVKQPINIRQHRDLSKKEYKQQYHVMNENNYLLAIYEGLVKNKVVREFEIVSYIEAAKYYKRSQDRNIFSSIVPTHSTKYGLPLKTKLLMGQLVLMFEENPDEIQVDNTKDLVKRLYKVVGIEKDGRIKFKYHQEARKEGLPIFSTPYKNNDDYAPIFRQSINNINILVDGIDFTIDILGKVTLKE

SEQ ID NO: 379 - protein, 1088 aa, Bacillus smithii
MNYKMGLDIGIASVGWAVINLDLKRIEDLGVRIFDKAEHPQNGESLALPRRIARSARRRLRRRKHRLERIRRLLVSENVLTKEEMNLLFKQKKQIDVWQLRVDALERKLNNDELARVLLHLAKRRGFKSNRKSERNSKESSEFLKNIEENQSILAQYRSVGEMIVKDSKFAYHKRNKLDSYSNMIARDDLEREIKLIFEKQREFNNPVCTERLEEKYLNIWSSQRPFASKEDIEKKVGFCTFEPKEKRAPKATYTFQSFIVWEHINKLRLVSPDETRALTEIERNLLYKQAFSKNKMTYYDIRKLLNLSDDIHFKGLLYDPKSSLKQIENIRFLELDSYHKIRKCIENVYGKDGIRMFNETDIDTFGYALTIFKDDEDIVAYLQNEYITKNGKRVSNLANKVYDKSLIDELLNLSFSKFAHLSMKAIRNILPYMEQGEIYSKACELAGYNFTGPKKKEKALLLPVIPNIANPVVMRALTQSRKVVNAIIKKYGSPVSIHIELARDLSHSFDERKKIQKDQTENRKKNETAIKQLIEYELTKNPTGLDIVKFKLWSEQQGRCMYSLKPIELERLLEPGYVEVDHILPYSRSLDDSYANKVLVLTKENREKGNHTPVEYLGLGSERWKKFEKFVLANKQFSKKKKQNLLRLRYEETEEKEFKERNLNDTRYISKFFANFIKEHLKFADGDGGQKVYTINGKITAHLRSRWDFNKNREESDLHHAVDAVIVACATQGMIKKITEFYKAREQNKESAKKKEPIFPQPWPHFADELKARLSKFPQESIEAFALGNYDRKKLESLRPVFVSRMPKRSVTGAAHQETLRRCVGIDEQSGKIQTAVKTKLSDIKLDKDGHFPMYQKESDPRTYEAIRQRLLEHNNDPKKAFQEPLYKPKKNGEPGPVIRTVKIIDTKNKVVHLDGSKTVAYNSNIVRTDVFEKDGKYYCVPVYTMDIMKGTLPNKAIEANKPYSEWKEMTEEYTFQFSLFPNDLVRIVLPREKTIKTSTNEEIIIKDIFAYYKTIDSATGGLELISHDRNFSLRGVGSKTLKRFEKYQVDVLGNIHKVKGEKRVGLAAPTNQKKGKTVDSLQSVSD

SEQ ID NO: 380 - protein, 1035 aa, Puniceispirillum marinum
MRRLGLDLGTNSIGWCLLDLGDDGEPVSIFRTGARIFSDGRDPKSLGSLKATRREARLTRRRRDRFIQRQKNLINALVKYGLMPADEIQRQALAYKDPYPIRKKALDEAIDPYEMGRAIFHINQRRGFKSNRKSADNEAGVVKQSIADLEMKLGEAGARTIGEFLADRQATNDTVRARRLSGTNALYEFYPDRYMLEQEFDTLWAKQAAFNPSLYIEAARERLKEIVFFQRKLKPQEVGRCIFLSDEDRISKALPSFQRFRIYQELSNLAWIDHDGVAHRITASLALRDHLFDELEHKKKLTFKAMRAILRKQGVVDYPVGFNLESDNRDHLIGNLTSCIMRDAKKMIGSAWDRLDEEEQDSFILMLQDDQKGDDEVRSILTQQYGLSDDVAEDCLDVRLPDGHGSLSKKAIDRILPVLRDQGLIYYDAVKEAGLGEANLYDPYAALSDKLDYYGKALAGHVMGASGKFEDSDEKRYGTISNPTVHIALNQVRAVVNELIRLHGKPDEVVIEIGRDLPMGADGKRELERFQKEGRAKNERARDELKKLGHIDSRESRQKFQLWEQLAKEPVDRCCPFTGKMMSISDLFSDKVEIEHLLPFSLTLDDSMANKTVCFRQANRDKGNRAPFDAFGNSPAGYDWQEILGRSQNLPYAKRWRFLPDAMKRFEADGGFLERQLNDTRYISRYTTEYISTIIPKNKIWVVTGRLTSLLRGFWGLNSILRGHNTDDGTPAKKSRDDHRHHAIDAIVVGMTSRGLLQKVSKAARRSEDLDLTRLFEGRIDPWDGFRDEVKKHIDAIIVSHRPRKKSQGALHNDTAYGIVEHAENGASTVVHRVPITSLGKQSDIEKVRDPLIKSALLNETAGLSGKSFENAVQKWCADNSIKSLRIVETVSIIPITDKEGVAYKGYKGDGNAYMDIYQDPTSSKWKGEIVSRFDANQKGFIPSWQSQFPTARLIMRLRINDLLKLQDGEIEEIYRVQRLSGSKILMAPHTEANVDARDRDKNDTFKLTSKSPGKLQSASARKVHISPTGLIREG

SEQ ID NO: 381 - protein, 1153 aa, Barnesiella intestinihominis
MKNILGLDLGLSSIGWSVIRENSEEQELVAMGSRVVSLTAAELSSFTQGNGVSINSQRTQKRTQRKGYDRYQLRRTLLRNKLDTLGMLPDDSLSYLPKLQLWGLRAKAVTQRIELNELGRVLLHLNQKRGYKSIKSDFSGDKKITDYVKTVKTRYDELKEMRLTIGELFFRRLTENAFFRCKEQVYPRQAYVEEFDCIMNCQRKFYPDILTDETIRCIRDEIIYYQRPLKSCKYLVSRCEFEKRFYLNAAGKKTEAGPKVSPRTSPLFQVCRLWESINNIVVKDRRNEIVFISAEQRAALFDFLNTHEKLKGSDLLKLLGLSKTYGYRLGEQFKTGIQGNKTRVEIERALGNYPDKKRLLQFNLQEESSSMVNTETGEIIPMISLSFEQEPLYRLWHVLYSIDDREQLQSVLRQKFGIDDDEVLERLSAIDLVKAGFGNKSSKAIRRILPFLQLGMNYAEACEAAGYNHSNNYTKAENEARALLDRLPAIKKNELRQPVVEKILNQMVNVVNALMEKYGRFDEIRVELARELKQSKEERSNTYKSINKNQRENEQIAKRIVEYGVPTRSRIQKYKMWEESKHCCIYCGQPVDVGDFLRGFDVEVEHIIPKSLYFDDSFANKVCSCRSCNKEKNNRTAYDYMKSKGEKALSDYVERVNTMYTNNQISKTKWQNLLTPVDKISIDFIDRQLRESQYIARKAKEILTSICYNVTATSGSVTSFLRHVWGWDTVLHDLNFDRYKKVGLTEVIEVNHRGSVIRREQIKDWSKRFDHRHHAIDALTIACTKQAYIQRLNNLRAEEGPDFNKMSLERYIQSQPHFSVAQVREAVDRILVSFRAGKRAVTPGKRYIRKNRKRISVQSVLIPRGALSEESVYGVIHVWEKDEQGHVIQKQRAVMKYPITSINREMLDKEKVVDKRIHRILSGRLAQYNDNPKEAFAKPVYIDKECRIPIRTVRCFAKPAINTLVPLKKDDKGNPVAWVNPGNNHHVAIYRDEDGKYKERTVTFWEAVDRCRVGIPAIVTQPDTIWDNILQRNDISENVLESLPDVKWQFVLSLQQNEMFILGMNEEDYRYAMDQQDYALLNKYLYRVQKLSKSDYSFRYHTETSVEDKYDGKPNLKLSMQMGKLKRVSIKSLLGLNPHKVHISVLGEIKEIS

SEQ ID NO: 382 - protein, 1062 aa, Ralstonia syzygii
MAEKQHRWGLDIGTNSIGWAVIALIEGRPAGLVATGSRIFSDGRNPKDGSSLAVERRGPRQMRRRRDRYLRRRDRFMQALINVGLMPGDAAARKALVTENPYVLRQRGLDQALTLPEFGRALFHLNQRRGFQSNRKTDRATAKESGKVKNAIAAFRAGMGNARTVGEALARRLEDGRPVRARMVGQGKDEHYELYIAREWIAQEFDALWASQQRFHAEVLADAARDRLRAILLFQRKLLPVPVGKCFLEPNQPRVAAALPSAQRFRLMQELNHLRVMTLADKRERPLSFQERNDLLAQLVARPKCGFDMLRKIVFGANKEAYRFTIESERRKELKGCDTAAKLAKVNALGTRWQALSLDEQDRLVCLLLDGENDAVLADALREHYGLTDAQIDTLLGLSFEDGHMRLGRSALLRVLDALESGRDEQGLPLSYDKAVVAAGYPAHTADLENGERDALPYYGELLWRYTQDAPTAKNDAERKFGKIANPTVHIGLNQLRKLVNALIQRYGKPAQIVVELARNLKAGLEEKERIKKQQTANLERNERIRQKLQDAGVPDNRENRLRMRLFEELGQGNGLGTPCIYSGRQISLQRLFSNDVQVDHILPFSKTLDDSFANKVLAQHDANRYKGNRGPFEAFGANRDGYAWDDIRARAAVLPRNKRNRFAETAMQDWLHNETDFLARQLTDTAYLSRVARQYLTAICSKDDVYVSPGRLTAMLRAKWGLNRVLDGVMEEQGRPAVKNRDDHRHHAIDAVVIGATDRAMLQQVATLAARAREQDAERLIGDMPTPWPNFLEDVRAAVARCVVSHKPDHGPEGGLHNDTAYGIVAGPFEDGRYRVRHRVSLFDLKPGDLSNVRCDAPLQAELEPIFEQDDARAREVALTALAERYRQRKVWLEELMSVLPIRPRGEDGKTLPDSAPYKAYKGDSNYCYELFINERGRWDGELISTFRANQAAYRRFRNDPARFRRYTAGGRPLLMRLCINDYIAVGTAAERTIFRVVKMSENKITLAEHFEGGTLKQRDADKDDPFKYLTKSPGALRDLGARRIFVDLIGRVLDPGIKGD

SEQ ID NO: 383 - protein, 1059 aa, Wolinella succinogenes
MIERILGVDLGISSLGWAIVEYDKDDEAANRIIDCGVRLFTAAETPKKKESPNKARREARGIRRVLNRRRVRMNMIKKLFLRAGLIQDVDLDGEGGMFYSKANRADVWELRHDGLYRLLKGDELARVLIHIAKHRGYKFIGDDEADEESGKVKKAGVVLRQNFEAAGCRTVGEWLWRERGANGKKRNKHGDYEISIHRDLLVEEVEAIFVAQQEMRSTIATDALKAAYREIAFFVRPMQRIEKMVGHCTYFPEERRAPKSAPTAEKFIAISKFFSTVIIDNEGWEQKIIERKTLEELLDFAVSREKVEFRHLRKFLDLSDNEIFKGLHYKGKPKTAKKREATLFDPNEPTELEFDKVEAEKKAWISLRGAAKLREALGNEFYGRFVALGKHADEATKILTYYKDEGQKRRELTKLPLEAEMVERLVKIGFSDFLKLSLKAIRDILPAMESGARYDEAVLMLGVPHKEKSAILPPLNKTDIDILNPTVIRAFAQFRKVANALVRKYGAFDRVHFELAREINTKGEIEDIKESQRKNEKERKEAADWIAETSFQVPLTRKNILKKRLYIQQDGRCAYTGDVIELERLFDEGYCEIDHILPRSRSADDSFANKVLCLARANQQKTDRTPYEWFGHDAARWNAFETRTSAPSNRVRTGKGKIDRLLKKNFDENSEMAFKDRNLNDTRYMARAIKTYCEQYWVFKNSHTKAPVQVRSGKLTSVLRYQWGLESKDRESHTHHAVDAIIIAFSTQGMVQKLSEYYRFKETHREKERPKLAVPLANFRDAVEEATRIENTETVKEGVEVKRLLISRPPRARVTGQAHEQTAKPYPRIKQVKNKKKWRLAPIDEEKFESFKADRVASANQKNFYETSTIPRVDVYHKKGKFHLVPIYLHEMVLNELPNLSLGTNPEAMDENFFKFSIFKDDLISIQTQGTPKKPAKIIMGYFKNMHGANMVLSSINNSPCEGFTCTPVSMDKKHKDKCKLCPEENRIAGRCLQGFLDYWSQEGLRPPRKEFECDQGVKFALDVKKYQIDPLGYYYEVKQEKRLGTIPQMRSAKKLVKK

SEQ ID NO: 384 - protein, 1269 aa, Mycoplasma gallisepticum
MNNSIKSKPEVTIGLDLGVGSVGWAIVDNETNIIHHLGSRLFSQAKTAEDRRSFRGVRRLIRRRKYKLKRFVNLIWKYNSYFGFKNKEDILNNYQEQQKLHNTVLNLKSEALNAKIDPKALSWILHDYLKNRGHFYEDNRDFNVYPTKELAKYFDKYGYYKGIIDSKEDNDNKLEEELTKYKFSNKHWLEEVKKVLSNQTGLPEKFKEEYESLFSYVRNYSEGPGSINSVSPYGIYHLDEKEGKVVQKYNNIWDKTIGKCNIFPDEYRAPKNSPIAMIFNEINELSTIRSYSIYLTGWFINQEFKKAYLNKLLDLLIKTNGEKPIDARQFKKLREETIAESIGKETLKDVENEEKLEKEDHKWKLKGLKLNTNGKIQYNDLSSLAKFVHKLKQHLKLDFLLEDQYATLDKINFLQSLFVYLGKHLRYSNRVDSANLKEFSDSNKLFERILQKQKDGLFKLFEQTDKDDEKILAQTHSLSTKAMLLAITRMTNLDNDEDNQKNNDKGWNFEAIKNFDQKFIDITKKNNNLSLKQNKRYLDDRFINDAILSPGVKRILREATKVFNAILKQFSEEYDVTKVVIELARELSEEKELENTKNYKKLIKKNGDKISEGLKALGISEDEIKDILKSPTKSYKFLLWLQQDHIDPYSLKEIAFDDIFTKTEKFEIDHIIPYSISFDDSSSNKLLVLAESNQAKSNQTPYEFISSGNAGIKWEDYEAYCRKFKDGDSSLLDSTQRSKKFAKMMKTDTSSKYDIGFLARNLNDTRYATIVFRDALEDYANNHLVEDKPMFKVVCINGSVTSFLRKNFDDSSYAKKDRDKNIHHAVDASIISIFSNETKTLFNQLTQFADYKLFKNTDGSWKKIDPKTGVVTEVTDENWKQIRVRNQVSEIAKVIEKYIQDSNIERKARYSRKIENKTNISLFNDTVYSAKKVGYEDQIKRKNLKTLDIHESAKENKNSKVKRQFVYRKLVNVSLLNNDKLADLFAEKEDILMYRANPWVINLAEQIFNEYTENKKIKSQNVFEKYMLDLTKEFPEKFSEFLVKSMLRNKTAIIYDDKKNIVHRIKRLKMLSSELKENKLSNVIIRSKNQSGTKLSYQDTINSLALMIMRSIDPTAKKQYIRVPLNTLNLHLGDHDFDLHNMDAYLKKPKFVKYLKANEIGDEYKPWRVLTSGTLLIHKKDKKLMYISSFQNLNDVIEIKNLIETEYKENDDSDSKKKKKANRFLMTLSTILNDYILLDAKDNFDILGLSKNRIDEILNSKLGLDKIVK

SEQ ID NO: 385 - protein, 1138 aa, Acidothermus cellulolyticus
MGGSEVGTVPVTWRLGVDVGERSIGLAAVSYEEDKPKEILAAVSWIHDGGVGDERSGASRLALRGMARRARRLRRFRRARLRDLDMLLSELGWTPLPDKNVSPVDAWLARKRLAEEYVVDETERRRLLGYAVSHMARHRGWRNPWTTIKDLKNLPQPSDSWERTRESLEARYSVSLEPGTVGQWAGYLLQRAPGIRLNPTQQSAGRRAELSNATAFETRLRQEDVLWELRCIADVQGLPEDVVSNVIDAVFCQKRPSVPAERIGRDPLDPSQLRASRACLEFQEYRIVAAVANLRIRDGSGSRPLSLEERNAVIEALLAQTERSLTWSDIALEILKLPNESDLTSVPEEDGPSSLAYSQFAPFDETSARIAEFIAKNRRKIPTFAQWWQEQDRTSRSDLVAALADNSIAGEEEQELLVHLPDAELEALEGLALPSGRVAYSRLTLSGLTRVMRDDGVDVHNARKTCFGVDDNWRPPLPALHEATGHPVVDRNLAILRKFLSSATMRWGPPQSIVVELARGASESRERQAEEEAARRAHRKANDRIRAELRASGLSDPSPADLVRARLLELYDCHCMYCGAPISWENSELDHIVPRTDGGSNRHENLAITCGACNKEKGRRPFASWAETSNRVQLRDVIDRVQKLKYSGNMYWTRDEFSRYKKSVVARLKRRTSDPEVIQSIESTGYAAVALRDRLLSYGEKNGVAQVAVFRGGVTAEARRWLDISIERLFSRVAIFAQSTSTKRLDRRHHAVDAVVLTTLTPGVAKTLADARSRRVSAEFWRRPSDVNRHSTEEPQSPAYRQWKESCSGLGDLLISTAARDSIAVAAPLRLRPTGALHEETLRAFSEHTVGAAWKGAELRRIVEPEVYAAFLALTDPGGRFLKVSPSEDVLPADENRHIVLSDRVLGPRDRVKLFPDDRGSIRVRGGAAYIASFHHARVFRWGSSHSPSFALLRVSLADLAVAGLLRDGVDVFTAELPPWTPAWRYASIALVKAVESGDAKQVGWLVPGDELDFGPEGVTTAAGDLSMFLKYFPERHWVVTGFEDDKRINLKPAFLSAEQAEVLRTERSDRPDTLTEAGEILAQFFPRCWRATVAKVLCHPGLTVIRRTALGQPRWRRGHLPYSWRPWSADPWSGGTP

SEQ ID NO: 386 - protein, 1265 aa, Mycoplasma ovipneumoniae
MHNKKNITIGFDLGIASIGWAIIDSTTSKILDWGTRTFEERKTANERRAFRSTRRNIRRKAYRNQRFINLILKYKDLFELKNISDIQRANKKDTENYEKIISFFTEIYKKCAAKHSNILEVKVKALDSKIEKLDLIWILHDYLENRGFFYDLEEENVADKYEGIEHPSILLYDFFKKNGFFKSNSSIPKDLGGYSFSNLQWVNEIKKLFEVQEINPEFSEKFLNLFTSVRDYAKGPGSEHSASEYGIFQKDEKGKVFKKYDNIWDKTIGKCSFFVEENRSPVNYPSYEIFNLLNQLINLSTDLKTTNKKIWQLSSNDRNELLDELLKVKEKAKIISISLKKNEIKKIILKDFGFEKSDIDDQDTIEGRKIIKEEPTTKLEVTKHLLATIYSHSSDSNWININNILEFLPYLDAICIILDREKSRGQDEVLKKLTEKNIFEVLKIDREKQLDFVKSIFSNTKFNFKKIGNFSLKAIREFLPKMFEQNKNSEYLKWKDEEIRRKWEEQKSKLGKTDKKTKYLNPRIFQDEIISPGTKNTFEQAVLVLNQIIKKYSKENIIDAIIIESPREKNDKKTIEEIKKRNKKGKGKTLEKLFQILNLENKGYKLSDLETKPAKLLDRLRFYHQQDGIDLYTLDKINIDQLINGSQKYEIEHIIPYSMSYDNSQANKILTEKAENLKKGKLIASEYIKRNGDEFYNKYYEKAKELFINKYKKNKKLDSYVDLDEDSAKNRFRFLTLQDYDEFQVEFLARNLNDTRYSTKLFYHALVEHFENNEFFTYIDENSSKHKVKISTIKGHVTKYFRAKPVQKNNGPNENLNNNKPEKIEKNRENNEHHAVDAAIVAIIGNKNPQIANLLTLADNKTDKKFLLHDENYKENIETGELVKIPKFEVDKLAKVEDLKKIIQEKYEEAKKHTAIKFSRKTRTILNGGLSDETLYGFKYDEKEDKYFKIIKKKLVTSKNEELKKYFENPFGKKADGKSEYTVLMAQSHLSEFNKLKEIFEKYNGFSNKTGNAFVEYMNDLALKEPTLKAEIESAKSVEKLLYYNFKPSDQFTYHDNINNKSFKRFYKNIRIIEYKSIPIKFKILSKHDGGKSFKDTLFSLYSLVYKVYENGKESYKSIPVTSQMRNFGIDEFDFLDENLYNKEKLDIYKSDFAKPIPVNCKPVFVLKKGSILKKKSLDIDDFKETKETEEGNYYFISTISKRFNRDTAYGLKPLKLSVVKPVAEPSTNPIFKEYIPIHLDELGNEYPVKIKEHTDDEKLMCTIK

SEQ ID NO: 387 - DNA, 1150 bp, Artificial Sequence
  source: /note="Description of Artificial Sequence: Synthetic polynucleotide"
aaaacatttttcttcattcgtaaaatgtatatgtgtactcctttaaatagaagtaatataaaaaacagaatttacttagtgtttaaagaggtatgttctgagtcacacaagatgacaagcaatgtgattgctttatgagccaaggagagcatgatttatattaattgaaaatgataaaatagaggagcatacaaaaggattaaaccaaaaattgccctggataagttttatttatattaattacttaaatgtgtggattcagaaataagtgtatatgctgttttcacaaaaatagttatcagctgacatttttttcttttttcccagcttcacgaaggtataattaaataaaaattgtatatatttatggcagacaacatgatgttttgatatatgtacacattataaaatgattaattccagctaattaatgtatccatcacctcatgtacttatcatgtttttggggtgagaacatttaagatctaatctcttagcaattttcaagtatacaatacattattattaagtatagtcaccatgctgtacaatagagctccagaacttattcattctgtctagctgaaactttgtactcagcttaaccttttattaaacatctttagagatttcttatctttagaaaaacaactaatttgttatatgtaattctactataattttaaatgagcacatttgttaaaatagtttttaagatttgttaaagagaaaaagagctccagcatatgtaacagaaacaacatttgcattaagcatttttctttgcattaagtaataattaaaaatttatgaagttcatcgcaaacagttgtatattaaagctaaattaaatattgtcattgaattttgagagtaagattggccccctatggcattgcttgtgagaaaacactcaatattttgtgttcgtatcatctgcagtagcattgtttgtgtctcgtctatcttgaatgaaatcattttcccatcctcaccttttaaatatattttatctttagggcttaggtgtgatcattgcaattttggatttaaatttctccgaagctttaatgatgttggatgtgagccctgccagtgtaacctccatggctcagtgaacaaattctgcaatcctcactctgggcagtgt

SEQ ID NO: 388 - DNA, 1150 bp, Artificial Sequence
  source: /note="Description of Artificial Sequence: Synthetic polynucleotide"
agtgcaaaaaagaagccaaaggacttcagtgtgacacctgcagagaaaacttttatgggttagatgtcaccaattgtaaggcctgtgactgtgacacagctggatccctccctgggactgtctgtaatgctaagacagggcagtgcatctgcaagcccaatgttgaagggagacagtgcaataaatgtttggagggaaacttctacctacggcaaaataattctttcctctgtctgccttgcaactgtgataagactgggacaataaatggctctctgctgtgtaacaaatcaacaggacaatgtccttgcaaattaggggtaacaggtcttcgctgtaatcagtgtgagcctcacaggtacaatttgaccattgacaattttcaacactgccagatgtgtgagtgtgattccttggggacattacctgggaccatttgtgacccaatcagtggccagtgcctgtgtgtgcctaatcgtcaaggaagaaggtgtaatcagtgtcaaccaggtaagaaagaaatgtattacattttcagtgcacaatgacattccttttgttaacttaggtaacttctccctgtttctggtttgtggcttctacaaattttatttccaaaatcattactgtatttatatcattatccaacacatatataactatttaacttattcaaaattatctgcatatttatgttactattttgagaggatactttagataaaactcagccgatcggatttatttcataattgagactcaatttctacacttgaagtaaatctcctttttaacagttttttaaaaatcagatcaacaagagtcaattttattttccagagaaaggaaaatttgagttgaatatccatacaatgccaaatattcaaatgatgaactaaatctctgaataaagctggctaaatgtttttgctgaagaggctatatgttctagttttatatagaaatacctagaattgtttccacatgccatcaaattaataaaataggccactgtttaatctcattatatacaaacttatctttccatctctttcccaattgggagagggatagaccccatctatggctctccttacatttaagattttaactaaaatactataccttctttacaataaattcattatga

SEQ ID NO: 389 - DNA, 2301 bp, Artificial Sequence
  source: /note="Description of Artificial Sequence: Synthetic polynucleotide"
aaaacatttttcttcattcgtaaaatgtatatgtgtactcctttaaatagaagtaatataaaaaacagaatttacttagtgtttaaagaggtatgttctgagtcacacaagatgacaagcaatgtgattgctttatgagccaaggagagcatgatttatattaattgaaaatgataaaatagaggagcatacaaaaggattaaaccaaaaattgccctggataagttttatttatattaattacttaaatgtgtggattcagaaataagtgtatatgctgttttcacaaaaatagttatcagctgacatttttttcttttttcccagcttcacgaaggtataattaaataaaaattgtatatatttatggcagacaacatgatgttttgatatatgtacacattataaaatgattaattccagctaattaatgtatccatcacctcatgtacttatcatgtttttggggtgagaacatttaagatctaatctcttagcaattttcaagtatacaatacattattattaagtatagtcaccatgctgtacaatagagctccagaacttattcattctgtctagctgaaactttgtactcagcttaaccttttattaaacatctttagagatttcttatctttagaaaaacaactaatttgttatatgtaattctactataattttaaatgagcacatttgttaaaatagtttttaagatttgttaaagagaaaaagagctccagcatatgtaacagaaacaacatttgcattaagcatttttctttgcattaagtaataattaaaaatttatgaagttcatcgcaaacagttgtatattaaagctaaattaaatattgtcattgaattttgagagtaagattggccccctatggcattgcttgtgagaaaacactcaatattttgtgttcgtatcatctgcagtagcattgtttgtgtctcgtctatcttgaatgaaatcattttcccatcctcaccttttaaatatattttatctttagggcttaggtgtgatcattgcaattttggatttaaatttctccgaagctttaatgatgttggatgtgagccctgccagtgtaacctccatggctcagtgaacaaattctgcaatcctcactctgggcagtgtgagtgcaaaaaagaagccaaaggacttcagtgtgacacctgcagagaaaacttttatgggttagatgtcaccaattgtaaggcctgtgactgtgacacagctggatccctccctgggactgtctgtaatgctaagacagggcagtgcatctgcaagcccaatgttgaagggagacagtgcaataaatgtttggagggaaacttctacctacggcaaaataattctttcctctgtctgccttgcaactgtgataagactgggacaataaatggctctctgctgtgtaacaaatcaacaggacaatgtccttgcaaattaggggtaacaggtcttcgctgtaatcagtgtgagcctcacaggtacaatttgaccattgacaattttcaacactgccagatgtgtgagtgtgattccttggggacattacctgggaccatttgtgacccaatcagtggccagtgcctgtgtgtgcctaatcgtcaaggaagaaggtgtaatcagtgtcaaccaggtaagaaagaaatgtattacattttcagtgcacaatgacattccttttgttaacttaggtaacttctccctgtttctggtttgtggcttctacaaattttatttccaaaatcattactgtatttatatcattatccaacacatatataactatttaacttattcaaaattatctgcatatttatgttactattttgagaggatactttagataaaactcagccgatcggatttatttcataattgagactcaatttctacacttgaagtaaatctcctttttaacagttttttaaaaatcagatcaacaagagtcaattttattttccagagaaaggaaaatttgagttgaatatccatacaatgccaaatattcaaatgatgaactaaatctctgaataaagctggctaaatgtttttgctgaagaggctatatgttctagttttatatagaaatacctagaattgtttccacatgccatcaaattaataaaataggccactgtttaatctcattatatacaaacttatctttccatctctttcccaattgggagagggatagaccccatctatggctctccttacatttaagattttaactaaaatactataccttctttacaataaattcattatga

SEQ ID NO: 390 - DNA, 1703 bp, Artificial Sequence
  source: /note="Description of Artificial Sequence: Synthetic polynucleotide"
agcttaaccttttattaaacatctttagagatttcttatctttagaaaaacaactaatttgttatatgtaattctactataattttaaatgagcacatttgttaaaatagtttttaagatttgttaaagagaaaaagagctccagcatatgtaacagaaacaacatttgcattaagcatttttctttgcattaagtaataattaaaaatttatgaagttcatcgcaaacagttgtatattaaagctaaattaaatattgtcattgaattttgagagtaagattggccccctatggcattgcttgtgagaaaacactcaatattttgtgttcgtatcatctgcagtagcattgtttgtgtctcgtctatcttgaatgaaatcattttcccatcctcaccttttaaatatattttatctttagggcttaggtgtgatcattgcaattttggatttaaatttctccgaagctttaatgatgttggatgtgagccctgccagtgtaacctccatggctcagtgaacaaattctgcaatcctcactctgggcagtgtgagtgcaaaaaagaagccaaaggacttcagtgtgacacctgcagagaaaacttttatgggttagatgtcaccaattgtaaggcctgtgactgtgacacagctggatccctccctgggactgtctgtaatgctaagacagggcagtgcatctgcaagcccaatgttgaagggagacagtgcaataaatgtttggagggaaacttctacctacggcaaaataattctttcctctgtctgccttgcaactgtgataagactgggacaataaatggctctctgctgtgtaacaaatcaacaggacaatgtccttgcaaattaggggtaacaggtcttcgctgtaatcagtgtgagcctcacaggtacaatttgaccattgacaattttcaacactgccagatgtgtgagtgtgattccttggggacattacctgggaccatttgtgacccaatcagtggccagtgcctgtgtgtgcctaatcgtcaaggaagaaggtgtaatcagtgtcaaccaggtaagaaagaaatgtattacattttcagtgcacaatgacattccttttgttaacttaggtaacttctccctgtttctggtttgtggcttctacaaattttatttccaaaatcattactgtatttatatcattatccaacacatatataactatttaacttattcaaaattatctgcatatttatgttactattttgagaggatactttagataaaactcagccgatcggatttatttcataattgagactcaatttctacacttgaagtaaatctcctttttaacagttttttaaaaatcagatcaacaagagtcaattttattttccagagaaaggaaaatttgagttgaatatccatacaatgccaaatattcaaatgatgaactaaatctctgaataaagctggctaaatgtttttgctgaagaggctatatgttctagttttatatagaaatacctagaattgtttccacatgccatcaaattaataaaataggccactgtttaatctcattatatacaaacttatctttccatctctttcccaattgggagagggatagaccccatctatggctctccttacatttaagattttaactaaaatactataccttctttacaataaattcattatga

SEQ ID NO: 391 - DNA, 101 bp, Artificial Sequence
  source: /note="Description of Artificial Sequence: Synthetic polynucleotide"
acctccatggctcagtgaacaaattctgcaatcctcactctgggcagtgtgagtgcaaaaaagaagccaaaggacttcagtgtgacacctgcagagaaaac

SEQ ID NO: 392 - RNA, 20 nt, Artificial Sequence
  source: /note="Description of Artificial Sequence: Synthetic oligonucleotide"
gagugcaaaaaagaagccaa

SEQ ID NO: 393 - RNA, 20 nt, Artificial Sequence
  source: /note="Description of Artificial Sequence: Synthetic oligonucleotide"
guuagaugucaccaauugua

SEQ ID NO: 394 - RNA, 20 nt, Artificial Sequence
  source: /note="Description of Artificial Sequence: Synthetic oligonucleotide"
ggugucacacugaaguccuu

SEQ ID NO: 395 - RNA, 20 nt, Artificial Sequence
  source: /note="Description of Artificial Sequence: Synthetic oligonucleotide"
gccauggagguuacacuggc

SEQ ID NO: 396 - RNA, 17 nt, Artificial Sequence
  source: /note="Description of Artificial Sequence: Synthetic oligonucleotide"
gucacaggccuuacaau

SEQ ID NO: 397 - RNA, 17 nt, Artificial Sequence
  source: /note="Description of Artificial Sequence: Synthetic oligonucleotide"
gucacacugaaguccuu

SEQ ID NO: 398 - RNA, 17 nt, Artificial Sequence
  source: /note="Description of Artificial Sequence: Synthetic oligonucleotide"
ugcaaaaaagaagccaa

SEQ ID NO: 399 - RNA, 17 nt, Artificial Sequence
  source: /note="Description of Artificial Sequence: Synthetic oligonucleotide"
ugcagagaaaacuuuua

SEQ ID NO: 400 - RNA, 17 nt, Artificial Sequence
  source: /note="Description of Artificial Sequence: Synthetic oligonucleotide"
uguucacugagccaugg

SEQ ID NO: 401 - RNA, 17 nt, Artificial Sequence
  source: /note="Description of Artificial Sequence: Synthetic oligonucleotide"
auggagguuacacuggc

SEQ ID NO: 402 - RNA, 17 nt, Artificial Sequence
  source: /note="Description of Artificial Sequence: Synthetic oligonucleotide"
gcaagcccaauguugaa

SEQ ID NO: 403 - RNA, 17 nt, Artificial Sequence
  source: /note="Description of Artificial Sequence: Synthetic oligonucleotide"
gcauuacagacaguccc

SEQ ID NO: 404 - RNA, 17 nt, Artificial Sequence
  source: /note="Description of Artificial Sequence: Synthetic oligonucleotide"
gucacacugaaguccuu

SEQ ID NO: 405 - RNA, 17 nt, Artificial Sequence
  source: /note="Description of Artificial Sequence: Synthetic oligonucleotide"
gucacaggccuuacaau

SEQ ID NO: 406 - RNA, 17 nt, Artificial Sequence
  source: /note="Description of Artificial Sequence: Synthetic oligonucleotide"
gucuguaaugcuaagac

SEQ ID NO: 407 - RNA, 20 nt, Artificial Sequence
  source: /note="Description of Artificial Sequence: Synthetic oligonucleotide"
gacacagcuggaucccuccc

SEQ ID NO: 408 - RNA, 20 nt, Artificial Sequence
  source: /note="Description of Artificial Sequence: Synthetic oligonucleotide"
gagacagugcaauaaauguu

SEQ ID NO: 409 - RNA, 20 nt, Artificial Sequence
  source: /note="Description of Artificial Sequence: Synthetic oligonucleotide"
gcacuacacugcccagagug

SEQ ID NO: 410 - RNA, 20 nt, Artificial Sequence
  source: /note="Description of Artificial Sequence: Synthetic oligonucleotide"
gcacugucucccuucaacau

SEQ ID NO: 411 - RNA, 20 nt, Artificial Sequence
  source: /note="Description of Artificial Sequence: Synthetic oligonucleotide"
gccauggagguuacacuggc

SEQ ID NO: 412 - RNA, 20 nt, Artificial Sequence
  source: /note="Description of Artificial Sequence: Synthetic oligonucleotide"
gccugugacugugacacagc

SEQ ID NO: 413 - RNA, 20 nt, Artificial Sequence
  source: /note="Description of Artificial Sequence: Synthetic oligonucleotide"
ggugucacacugaaguccuu

SEQ ID NO: 414 - RNA, 20 nt, Artificial Sequence
  source: /note="Description of Artificial Sequence: Synthetic oligonucleotide"
guuagaugucaccaauugua

SEQ ID NO: 415 - RNA, 19 nt, Artificial Sequence
  source: /note="Description of Artificial Sequence: Synthetic oligonucleotide"
gcacuacacugcccagagu

SEQ ID NO: 416 - RNA, 19 nt, Artificial Sequence
  source: /note="Description of Artificial Sequence: Synthetic oligonucleotide"
gccugugacugugacacag

SEQ ID NO: 417 - RNA, 20 nt, Artificial Sequence
  source: /note="Description of Artificial Sequence: Synthetic oligonucleotide"
ggccugugacugugacacag

SEQ ID NO: 418 - RNA, 18 nt, Artificial Sequence
  source: /note="Description of Artificial Sequence: Synthetic oligonucleotide"
ggugugaucauugcaauu

SEQ ID NO: 419 - RNA, 22 nt, Artificial Sequence
  source: /note="Description of Artificial Sequence: Synthetic oligonucleotide"
gacaccugcagagaaaacuuuu

SEQ ID NO: 420 - RNA, 21 nt, Artificial Sequence
  source: /note="Description of Artificial Sequence: Synthetic oligonucleotide"
gcauuacagacagucccaggg

SEQ ID NO: 421 - RNA, 23 nt, Artificial Sequence
  source: /note="Description of Artificial Sequence: Synthetic oligonucleotide"
gcuuaggugugaucauugcaauu

SEQ ID NO: 422 - RNA, 24 nt, Artificial Sequence
  source: /note="Description of Artificial Sequence: Synthetic oligonucleotide"
gcuucuuuuuugcacuacacugcc

SEQ ID NO: 423 - RNA, 24 nt, Artificial Sequence
  source: /note="Description of Artificial Sequence: Synthetic oligonucleotide"
ggcuuaggugugaucauugcaauu

SEQ ID NO: 424 - RNA, 24 nt, Artificial Sequence
  source: /note="Description of Artificial Sequence: Synthetic oligonucleotide"
guaaggccugugacugugacacag

SEQ ID NO: 425 - RNA, 24 nt, Artificial Sequence
  source: /note="Description of Artificial Sequence: Synthetic oligonucleotide"
gugacaccugcagagaaaacuuuu

SEQ ID NO: 426 - RNA, 17 nt, Artificial Sequence
  source: /note="Description of Artificial Sequence: Synthetic oligonucleotide"
gugucacacugaagucc

SEQ ID NO: 427 - RNA, 17 nt, Artificial Sequence
  source: /note="Description of Artificial Sequence: Synthetic oligonucleotide"
ggugugaucauugcaau

SEQ ID NO: 428 - RNA, 20 nt, Artificial Sequence
  source: /note="Description of Artificial Sequence: Synthetic oligonucleotide"
gggcucacauccaacaucau

SEQ ID NO: 429 - RNA, 102 nt, Artificial Sequence; identical to SEQ ID NO: 45
  source: /note="Description of Artificial Sequence: Synthetic polynucleotide"
  modified_base (1)..(20): a, c, u, g, unknown or other

SEQ ID NO: 430 - RNA, 102 nt, Artificial Sequence
  source: /note="Description of Artificial Sequence: Synthetic polynucleotide"
  modified_base (1)..(20): a, c, u, g, unknown or other
nnnnnnnnnnnnnnnnnnnnguuuuaguacucuggaaacagaaucuacuaaaacaaggcaaaaugccguguuuaucucgucaacuuguuggcgagauuuuuu

SEQ ID NO: 431 - RNA, 20 nt, Artificial Sequence
  source: /note="Description of Artificial Sequence: Synthetic oligonucleotide"
gagugcaaaaaagaagccaa

SEQ ID NO: 432 - RNA, 20 nt, Artificial Sequence
  source: /note="Description of Artificial Sequence: Synthetic oligonucleotide"
guuagaugucaccaauugua

SEQ ID NO: 433 - RNA, 20 nt, Artificial Sequence
  source: /note="Description of Artificial Sequence: Synthetic oligonucleotide"
ggugucacacugaaguccuu

SEQ ID NO: 434 - RNA, 20 nt, Artificial Sequence
  source: /note="Description of Artificial Sequence: Synthetic oligonucleotide"
gccauggagguuacacuggc

SEQ ID NO: 435 - RNA, 17 nt, Artificial Sequence
  source: /note="Description of Artificial Sequence: Synthetic oligonucleotide"
gucacaggccuuacaau

SEQ ID NO: 436 - RNA, 17 nt, Artificial Sequence
  source: /note="Description of Artificial Sequence: Synthetic oligonucleotide"
gucacacugaaguccuu

SEQ ID NO: 437 - RNA, 17 nt, Artificial Sequence
  source: /note="Description of Artificial Sequence: Synthetic oligonucleotide"
ugcaaaaaagaagccaa

SEQ ID NO: 438 - RNA, 17 nt, Artificial Sequence
  source: /note="Description of Artificial Sequence: Synthetic oligonucleotide"
ugcagagaaaacuuuua

SEQ ID NO: 439 - RNA, 17 nt, Artificial Sequence
  source: /note="Description of Artificial Sequence: Synthetic oligonucleotide"
uguucacugagccaugg

SEQ ID NO: 440 - RNA, 17 nt, Artificial Sequence
  source: /note="Description of Artificial Sequence: Synthetic oligonucleotide"
auggagguuacacuggc

SEQ ID NO: 441 - RNA, 20 nt, Artificial Sequence
  source: /note="Description of Artificial Sequence: Synthetic oligonucleotide"
gccugugacugugacacagc

SEQ ID NO: 442 - RNA, 20 nt, Artificial Sequence
  source: /note="Description of Artificial Sequence: Synthetic oligonucleotide"
gacacagcuggaucccuccc

SEQ ID NO: 443 - RNA, 17 nt, Artificial Sequence
  source: /note="Description of Artificial Sequence: Synthetic oligonucleotide"
gcagagaaaacuuuuau

SEQ ID NO: 444 - RNA, 17 nt, Artificial Sequence
  source: /note="Description of Artificial Sequence: Synthetic oligonucleotide"
gucuguaaugcuaagac

SEQ ID NO: 445 - RNA, 17 nt, Artificial Sequence
  source: /note="Description of Artificial Sequence: Synthetic oligonucleotide"
gcauuacagacaguccc

SEQ ID NO: 446 - RNA, 17 nt, Artificial Sequence
  source: /note="Description of Artificial Sequence: Synthetic oligonucleotide"
ugccaguguaaccucca

SEQ ID NO: 447 - RNA, 17 nt, Artificial Sequence
  source: /note="Description of Artificial Sequence: Synthetic oligonucleotide"
uucugcaauccucacuc

SEQ ID NO: 448 - RNA, 17 nt, Artificial Sequence
  source: /note="Description of Artificial Sequence: Synthetic oligonucleotide"
ucugcaauccucacucu

SEQ ID NO: 449 - RNA, 17 nt, Artificial Sequence
  source: /note="Description of Artificial Sequence: Synthetic oligonucleotide"
auaaaaguuuucucugc

SEQ ID NO: 450 - RNA, 17 nt, Artificial Sequence
  source: /note="Description of Artificial Sequence: Synthetic oligonucleotide"
ucacacugcccagagug

SEQ ID NO: 451 - RNA, 17 nt, Artificial Sequence
  source: /note="Description of Artificial Sequence: Synthetic oligonucleotide"
auuuguucacugagcca

SEQ ID NO: 452 - RNA, 17 nt, Artificial Sequence
  source: /note="Description of Artificial Sequence: Synthetic oligonucleotide"
agccauggagguuacac

SEQ ID NO: 453 - RNA, 17 nt, Artificial Sequence
  source: /note="Description of Artificial Sequence: Synthetic oligonucleotide"
cuacacugcccagagug

SEQ ID NO: 454 - RNA, 20 nt, Artificial Sequence
  source: /note="Description of Artificial Sequence: Synthetic oligonucleotide"
aaauucugcaauccucacuc

SEQ ID NO: 455 - RNA, 20 nt, Artificial Sequence
  source: /note="Description of Artificial Sequence: Synthetic oligonucleotide"
aauucugcaauccucacucu

SEQ ID NO: 456 - RNA, 20 nt, Artificial Sequence
  source: /note="Description of Artificial Sequence: Synthetic oligonucleotide"
acacagcuggaucccucccu

SEQ ID NO: 457 - RNA, 20 nt, Artificial Sequence
  source: /note="Description of Artificial Sequence: Synthetic oligonucleotide"
accugcagagaaaacuuuua

SEQ ID NO: 458 - RNA, 20 nt, Artificial Sequence
  source: /note="Description of Artificial Sequence: Synthetic oligonucleotide"
acugucuguaaugcuaagac

SEQ ID NO: 459 - RNA, 20 nt, Artificial Sequence
  source: /note="Description of Artificial Sequence: Synthetic oligonucleotide"
aggugugaucauugcaauuu

SEQ ID NO: 460 - RNA, 20 nt, Artificial Sequence
  source: /note="Description of Artificial Sequence: Synthetic oligonucleotide"
auauuuuaucuuuagggcuu

SEQ ID NO: 461 - RNA, 20 nt, Artificial Sequence
  source: /note="Description of Artificial Sequence: Synthetic oligonucleotide"
cccugccaguguaaccucca

SEQ ID NO: 462 - RNA, 20 nt, Artificial Sequence
  source: /note="Description of Artificial Sequence: Synthetic oligonucleotide"
ccugcagagaaaacuuuuau

SEQ ID NO: 463 - RNA, 20 nt, Artificial Sequence
  source: /note="Description of Artificial Sequence: Synthetic oligonucleotide"
cuccgaagcuuuaaugaugu

SEQ ID NO: 464 - RNA, 20 nt, Artificial Sequence
  source: /note="Description of Artificial Sequence: Synthetic oligonucleotide"
cugucuguaaugcuaagaca

SEQ ID NO: 465 - RNA, 20 nt, Artificial Sequence
  source: /note="Description of Artificial Sequence: Synthetic oligonucleotide"
acagucacaggccuuacaau

SEQ ID NO: 466 - RNA, 20 nt, Artificial Sequence
  source: /note="Description of Artificial Sequence: Synthetic oligonucleotide"
agaauuuguucacugagcca

SEQ ID NO: 467 - RNA, 20 nt, Artificial Sequence
  source: /note="Description of Artificial Sequence: Synthetic oligonucleotide"
auccaacaucauuaaagcuu

SEQ ID NO: 468 - RNA, 20 nt, Artificial Sequence
  source: /note="Description of Artificial Sequence: Synthetic oligonucleotide"
auuacagacagucccaggga

SEQ ID NO: 469 - RNA, 20 nt, Artificial Sequence
  source: /note="Description of Artificial Sequence: Synthetic oligonucleotide"
auuuguucacugagccaugg

SEQ ID NO: 470 - RNA, 20 nt, Artificial Sequence
  source: /note="Description of Artificial Sequence: Synthetic oligonucleotide"
cacucacacugcccagagug

SEQ ID NO: 471 - RNA, 20 nt, Artificial Sequence
  source: /note="Description of Artificial Sequence: Synthetic oligonucleotide"
cauuacagacagucccaggg

SEQ ID NO: 472 - RNA, 20 nt, Artificial Sequence
  source: /note="Description of Artificial Sequence: Synthetic oligonucleotide"
ccauggagguuacacuggca

SEQ ID NO: 473 - RNA, 20 nt, Artificial Sequence
  source: /note="Description of Artificial Sequence: Synthetic oligonucleotide"
cccauaaaaguuuucucugc

SEQ ID NO: 474 - RNA, 20 nt, Artificial Sequence
  source: /note="Description of Artificial Sequence: Synthetic oligonucleotide"
cugagccauggagguuacac

SEQ ID NO: 475 - RNA, 20 nt, Artificial Sequence
  source: /note="Description of Artificial Sequence: Synthetic oligonucleotide"
uagcauuacagacaguccca

SEQ ID NO: 476 - RNA, 20 nt, Artificial Sequence
  source: /note="Description of Artificial Sequence: Synthetic oligonucleotide"
uccagcugugucacagucac

SEQ ID NO: 477 - RNA, 20 nt, Artificial Sequence
  source: /note="Description of Artificial Sequence: Synthetic oligonucleotide"
uuagcauuacagacaguccc

SEQ ID NO: 478 - RNA, 17 nt, Artificial Sequence
  source: /note="Description of Artificial Sequence: Synthetic oligonucleotide"
aauauauuuuaucuuua

SEQ ID NO: 479 - RNA, 17 nt, Artificial Sequence
  source: /note="Description of Artificial Sequence: Synthetic oligonucleotide"
uuuuaucuuuagggcuu

SEQ ID NO: 480 - RNA, 17 nt, Artificial Sequence
  source: /note="Description of Artificial Sequence: Synthetic oligonucleotide"
ugugaucauugcaauuu

SEQ ID NO: 481 - RNA, 17 nt, Artificial Sequence
  source: /note="Description of Artificial Sequence: Synthetic oligonucleotide"
cgaagcuuuaaugaugu

SEQ ID NO: 482 - RNA, 17 nt, Artificial Sequence
  source: /note="Description of Artificial Sequence: Synthetic oligonucleotide"
agaugucaccaauugua

SEQ ID NO: 483 - RNA, 17 nt, Artificial Sequence
  source: /note="Description of Artificial Sequence: Synthetic oligonucleotide"
ugugacugugacacagc

SEQ ID NO: 484 - RNA, 17 nt, Artificial Sequence
  source: /note="Description of Artificial Sequence: Synthetic oligonucleotide"
acagcuggaucccuccc

SEQ ID NO: 485 - RNA, 17 nt, Artificial Sequence
  source: /note="Description of Artificial Sequence: Synthetic oligonucleotide"
cagcuggaucccucccu

SEQ ID NO: 486 - RNA, 17 nt, Artificial Sequence
  source: /note="Description of Artificial Sequence: Synthetic oligonucleotide"
ucuguaaugcuaagaca

SEQ ID NO: 487 - RNA, 17 nt, Artificial Sequence
  source: /note="Description of Artificial Sequence: Synthetic oligonucleotide"
cauuacagacaguccca

SEQ ID NO: 488 - RNA, 17 nt, Artificial Sequence
  source: /note="Description of Artificial Sequence: Synthetic oligonucleotide"
uacagacagucccaggg

SEQ ID NO: 489 - RNA, 17 nt, Artificial Sequence
  source: /note="Description of Artificial Sequence: Synthetic oligonucleotide"
acagacagucccaggga

SEQ ID NO: 490 - RNA, 17 nt, Artificial Sequence
  source: /note="Description of Artificial Sequence: Synthetic oligonucleotide"
agcugugucacagucac

SEQ ID NO: 491 - RNA, 17 nt, Artificial Sequence
  source: /note="Description of Artificial Sequence: Synthetic oligonucleotide"
uggagguuacacuggca

SEQ ID NO: 492 - RNA, 17 nt, Artificial Sequence
  source: /note="Description of Artificial Sequence: Synthetic oligonucleotide"
caacaucauuaaagcuu

SEQ ID NO: 493 - RNA, 17 nt, Artificial Sequence
  source: /note="Description of Artificial Sequence: Synthetic oligonucleotide"
gcaagcccaauguugaa

SEQ ID NO: 494 - RNA, 17 nt, Artificial Sequence
  source: /note="Description of Artificial Sequence: Synthetic oligonucleotide"
gcauuacagacaguccc

SEQ ID NO: 495 - RNA, 17 nt, Artificial Sequence
  source: /note="Description of Artificial Sequence: Synthetic oligonucleotide"
gucacacugaaguccuu

SEQ ID NO: 496 - RNA, 17 nt, Artificial Sequence
  source: /note="Description of Artificial Sequence: Synthetic oligonucleotide"
gucacaggccuuacaau

SEQ ID NO: 497 - RNA, 17 nt, Artificial Sequence
  source: /note="Description of Artificial Sequence: Synthetic oligonucleotide"
gucuguaaugcuaagac

SEQ ID NO: 498 - RNA, 20 nt, Artificial Sequence
  source: /note="Description of Artificial Sequence: Synthetic oligonucleotide"
gacacagcuggaucccuccc

SEQ ID NO: 499 - RNA, 20 nt, Artificial Sequence
  source: /note="Description of Artificial Sequence: Synthetic oligonucleotide"
gagacagugcaauaaauguu

SEQ ID NO: 500 - RNA, 20 nt, Artificial Sequence
  source: /note="Description of Artificial Sequence: Synthetic oligonucleotide"
gcacuacacugcccagagug

SEQ ID NO: 501 - RNA, 20 nt, Artificial Sequence
  source: /note="Description of Artificial Sequence: Synthetic oligonucleotide"
gcacugucucccuucaacau

SEQ ID NO: 502 - RNA, 20 nt, Artificial Sequence
  source: /note="Description of Artificial Sequence: Synthetic oligonucleotide"
gccauggagguuacacuggc

SEQ ID NO: 503 - RNA, 20 nt, Artificial Sequence
  source: /note="Description of Artificial Sequence: Synthetic oligonucleotide"
gccugugacugugacacagc

SEQ ID NO: 504 - RNA, 20 nt, Artificial Sequence
  source: /note="Description of Artificial Sequence: Synthetic oligonucleotide"
ggugucacacugaaguccuu

SEQ ID NO: 505 - RNA, 20 nt, Artificial Sequence
  source: /note="Description of Artificial Sequence: Synthetic oligonucleotide"
guuagaugucaccaauugua

SEQ ID NO: 506 - RNA, 17 nt, Artificial Sequence
  source: /note="Description of Artificial Sequence: Synthetic oligonucleotide"
acagcuggaucccuccc

SEQ ID NO: 507 - RNA, 17 nt, Artificial Sequence
  source: /note="Description of Artificial Sequence: Synthetic oligonucleotide"
acagugcaauaaauguu

SEQ ID NO: 508 - RNA, 17 nt, Artificial Sequence
  source: /note="Description of Artificial Sequence: Synthetic oligonucleotide"
agaugucaccaauugua

SEQ ID NO: 509 - RNA, 17 nt, Artificial Sequence
  source: /note="Description of Artificial Sequence: Synthetic oligonucleotide"
agccauggagguuacac

SEQ ID NO: 510 - RNA, 17 nt, Artificial Sequence
  source: /note="Description of Artificial Sequence: Synthetic oligonucleotide"
auaaaaguuuucucugc

SEQ ID NO: 511 - RNA, 17 nt, Artificial Sequence
  source: /note="Description of Artificial Sequence: Synthetic oligonucleotide"
auggagguuacacuggc

SEQ ID NO: 512 - RNA, 17 nt, Artificial Sequence
  source: /note="Description of Artificial Sequence: Synthetic oligonucleotide"
auuuaaaaggugaggau

SEQ ID NO: 513 - RNA, 17 nt, Artificial Sequence
  source: /note="Description of Artificial Sequence: Synthetic oligonucleotide"
auuuguucacugagcca

SEQ ID NO: 514 - RNA, 17 nt, Artificial Sequence
  source: /note="Description of Artificial Sequence: Synthetic oligonucleotide"
caacaucauuaaagcuu

SEQ ID NO: 515 - RNA, 17 nt, Artificial Sequence
  source: /note="Description of Artificial Sequence: Synthetic oligonucleotide"
cagcuggaucccucccu

SEQ ID NO: 516 - RNA, 17 nt, Artificial Sequence
  source: /note="Description of Artificial Sequence: Synthetic oligonucleotide"
cauuacagacaguccca

SEQ ID NO: 517 - RNA, 17 nt, Artificial Sequence
  source: /note="Description of Artificial Sequence: Synthetic oligonucleotide"
cgaagcuuuaaugaugu

SEQ ID NO: 518 - RNA, 17 nt, Artificial Sequence
  source: /note="Description of Artificial Sequence: Synthetic oligonucleotide"
cuacacugcccagagug

SEQ ID NO: 519 - RNA, 17 nt, Artificial Sequence
  source: /note="Description of Artificial Sequence: Synthetic oligonucleotide"
cugucucccuucaacau

SEQ ID NO: 520 - RNA, 17 nt, Artificial Sequence
  source: /note="Description of Artificial Sequence: Synthetic oligonucleotide"
uacagacagucccaggg

SEQ ID NO: 521 - RNA, 17 nt, Artificial Sequence
  source: /note="Description of Artificial Sequence: Synthetic oligonucleotide"
ucugcaauccucacucu

SEQ ID NO: 522 - RNA, 17 nt, Artificial Sequence
  source: /note="Description of Artificial Sequence: Synthetic oligonucleotide"
ucuguaaugcuaagaca

SEQ ID NO: 523 - RNA, 17 nt, Artificial Sequence
  source: /note="Description of Artificial Sequence: Synthetic oligonucleotide"
ugcaagcccaauguuga

SEQ ID NO: 524 - RNA, 17 nt, Artificial Sequence
  source: /note="Description of Artificial Sequence: Synthetic oligonucleotide"
ugcagagaaaacuuuua

SEQ ID NO: 525 - RNA, 17 nt, Artificial Sequence
  source: /note="Description of Artificial Sequence: Synthetic oligonucleotide"
ugccaguguaaccucca

SEQ ID NO: 526 - RNA, 17 nt, Artificial Sequence
  source: /note="Description of Artificial Sequence: Synthetic oligonucleotide"
uggagguuacacuggca

SEQ ID NO: 527 - RNA, 17 nt, Artificial Sequence
  source: /note="Description of Artificial Sequence: Synthetic oligonucleotide"
ugucucccuucaacauu

SEQ ID NO: 528 - RNA, 17 nt, Artificial Sequence
  source: /note="Description of Artificial Sequence: Synthetic oligonucleotide"
ugugaucauugcaauuu

SEQ ID NO: 529 - RNA, 17 nt, Artificial Sequence
  source: /note="Description of Artificial Sequence: Synthetic oligonucleotide"
uguucacugagccaugg

SEQ ID NO: 530 - RNA, 17 nt, Artificial Sequence
  source: /note="Description of Artificial Sequence: Synthetic oligonucleotide"
uucugcaauccucacuc

SEQ ID NO: 531 - RNA, 17 nt, Artificial Sequence
  source: /note="Description of Artificial Sequence: Synthetic oligonucleotide"
uuuuaucuuuagggcuu

SEQ ID NO: 532 - RNA, 20 nt, Artificial Sequence
  source: /note="Description of Artificial Sequence: Synthetic oligonucleotide"
aaauucugcaauccucacuc

SEQ ID NO: 533 - RNA, 20 nt, Artificial Sequence
  source: /note="Description of Artificial Sequence: Synthetic oligonucleotide"
aauucugcaauccucacucu

SEQ ID NO: 534 - RNA, 20 nt, Artificial Sequence
  source: /note="Description of Artificial Sequence: Synthetic oligonucleotide"
acacagcuggaucccucccu

SEQ ID NO: 535 - RNA, 20 nt, Artificial Sequence
  source: /note="Description of Artificial Sequence: Synthetic oligonucleotide"
acagucacaggccuuacaau

SEQ ID NO: 536 - RNA, 20 nt, Artificial Sequence
  source: /note="Description of Artificial Sequence: Synthetic oligonucleotide"
acagugcaauaaauguuugg

SEQ ID NO: 537 - RNA, 20 nt, Artificial Sequence
  source: /note="Description of Artificial Sequence: Synthetic oligonucleotide"
accugcagagaaaacuuuua

SEQ ID NO: 538 - RNA, 20 nt, Artificial Sequence
  source: /note="Description of Artificial Sequence: Synthetic oligonucleotide"
acugucuguaaugcuaagac

SEQ ID NO: 539 - RNA, 20 nt, Artificial Sequence
  source: /note="Description of Artificial Sequence: Synthetic oligonucleotide"
agaauuuguucacugagcca

SEQ ID NO: 540 - RNA, 20 nt, Artificial Sequence
  source: /note="Description of Artificial Sequence: Synthetic oligonucleotide"
aggugugaucauugcaauuu

SEQ ID NO: 541 - RNA, 20 nt, Artificial Sequence
  source: /note="Description of Artificial Sequence: Synthetic oligonucleotide"
auauuuuaucuuuagggcuu

SEQ ID NO: 542 - RNA, 20 nt, Artificial Sequence
  source: /note="Description of Artificial Sequence: Synthetic oligonucleotide"
auccaacaucauuaaagcuu

SEQ ID NO: 543 - RNA, 20 nt, Artificial Sequence
  source: /note="Description of Artificial Sequence: Synthetic oligonucleotide"
aucugcaagcccaauguuga

SEQ ID NO: 544 - RNA, 20 nt, Artificial Sequence
  source: /note="Description of Artificial Sequence: Synthetic oligonucleotide"
auuacagacagucccaggga

SEQ ID NO: 545 - RNA, 20 nt, Artificial Sequence
  source: /note="Description of Artificial Sequence: Synthetic oligonucleotide"
cacugucucccuucaacauu

SEQ ID NO: 546 - RNA, 20 nt, Artificial Sequence
  source: /note="Description of Artificial Sequence: Synthetic oligonucleotide"
cagugcaauaaauguuugga

SEQ ID NO: 547 - RNA, 20 nt, Artificial Sequence
  source: /note="Description of Artificial Sequence: Synthetic oligonucleotide"
cauuacagacagucccaggg

SEQ ID NO: 548 - RNA, 20 nt, Artificial Sequence
  source: /note="Description of Artificial Sequence: Synthetic oligonucleotide"
ccauggagguuacacuggca

SEQ ID NO: 549 - RNA, 20 nt, Artificial Sequence
  source: /note="Description of Artificial Sequence: Synthetic oligonucleotide"
cccauaaaaguuuucucugc

SEQ ID NO: 550 - RNA, 20 nt, Artificial Sequence
  source: /note="Description of Artificial Sequence: Synthetic oligonucleotide"
cccugccaguguaaccucca

SEQ ID NO: 551 - RNA, 20 nt, Artificial Sequence
  source: /note="Description of Artificial Sequence: Synthetic oligonucleotide"
cuccgaagcuuuaaugaugu

SEQ ID NO: 552 - RNA, 20 nt, Artificial Sequence
  source: /note="Description of Artificial Sequence: Synthetic oligonucleotide"
cugagccauggagguuacac

SEQ ID NO: 553 - RNA, 20 nt, Artificial Sequence
  source: /note="Description of Artificial Sequence: Synthetic oligonucleotide"
cugucuguaaugcuaagaca

SEQ ID NO: 554 - RNA, 20 nt, Artificial Sequence
  source: /note="Description of Artificial Sequence: Synthetic oligonucleotide"
uagcauuacagacaguccca

SEQ ID NO: 555 - RNA, 20 nt, Artificial Sequence
  source: /note="Description of Artificial Sequence: Synthetic oligonucleotide"
ucugcaagcccaauguugaa

SEQ ID NO: 556 - RNA, 20 nt, Artificial Sequence
  source: /note="Description of Artificial Sequence: Synthetic oligonucleotide"
uuagcauuacagacaguccc

SEQ ID NO: 557 - RNA, 17 nt, Artificial Sequence
  source: /note="Description of Artificial Sequence: Synthetic oligonucleotide"
gauaaaauauauuuaaa

SEQ ID NO: 558 - RNA, 17 nt, Artificial Sequence
  source: /note="Description of Artificial Sequence: Synthetic oligonucleotide"
gcagagaaaacuuuuau

SEQ ID NO: 559 - RNA, 17 nt, Artificial Sequence
  source: /note="Description of Artificial Sequence: Synthetic oligonucleotide"
gugcaauaaauguuugg

SEQ ID NO: 560 - RNA, 17 nt, Artificial Sequence
  source: /note="Description of Artificial Sequence: Synthetic oligonucleotide"
aaauauauuuuaucuuu

SEQ ID NO: 561 - RNA, 17 nt, Artificial Sequence
  source: /note="Description of Artificial Sequence: Synthetic oligonucleotide"
aauauauuuaaaaggug

SEQ ID NO: 562 - RNA, 17 nt, Artificial Sequence
  source: /note="Description of Artificial Sequence: Synthetic oligonucleotide"
aauauauuuuaucuuua

SEQ ID NO: 563 - RNA, 17 nt, Artificial Sequence
  source: /note="Description of Artificial Sequence: Synthetic oligonucleotide"
acagacagucccaggga

SEQ ID NO: 564 - RNA, 17 nt, Artificial Sequence
  source: /note="Description of Artificial Sequence: Synthetic oligonucleotide"
agcugugucacagucac

SEQ ID NO: 565 - RNA, 17 nt, Artificial Sequence
  source: /note="Description of Artificial Sequence: Synthetic oligonucleotide"
uauuuaaaaggugagga

SEQ ID NO: 566 - RNA, 17 nt, Artificial Sequence
  source: /note="Description of Artificial Sequence: Synthetic oligonucleotide"
ugcaaaaaagaagccaa

SEQ ID NO: 567 - RNA, 17 nt, Artificial Sequence
  source: /note="Description of Artificial Sequence: Synthetic oligonucleotide"
ugcaauaaauguuugga

SEQ ID NO: 568 - RNA, 17 nt, Artificial Sequence
  source: /note="Description of Artificial Sequence: Synthetic oligonucleotide"
ugugacugugacacagc

SEQ ID NO: 569 - RNA, 20 nt, Artificial Sequence
  source: /note="Description of Artificial Sequence: Synthetic oligonucleotide"
aaagauaaaauauauuuaaa

SEQ ID NO: 570 - RNA, 20 nt, Artificial Sequence
  source: /note="Description of Artificial Sequence: Synthetic oligonucleotide"
auauauuuaaaaggugagga

SEQ ID NO: 571 - RNA, 20 nt, Artificial Sequence
  source: /note="Description of Artificial Sequence: Synthetic oligonucleotide"
auuuguucacugagccaugg

SEQ ID NO: 572 - RNA, 20 nt, Artificial Sequence
  source: /note="Description of Artificial Sequence: Synthetic oligonucleotide"
ccugcagagaaaacuuuuau

SEQ ID NO: 573 - RNA, 20 nt, Artificial Sequence
  source: /note="Description of Artificial Sequence: Synthetic oligonucleotide"
uaaaauauauuuaaaaggug

SEQ ID NO: 574 - RNA, 20 nt, Artificial Sequence
  source: /note="Description of Artificial Sequence: Synthetic oligonucleotide"
uagugcaaaaaagaagccaa

SEQ ID NO: 575 - RNA, 20 nt, Artificial Sequence
  source: /note="Description of Artificial Sequence: Synthetic oligonucleotide"
uauauuuaaaaggugaggau

SEQ ID NO: 576 - RNA, 20 nt, Artificial Sequence
  source: /note="Description of Artificial Sequence: Synthetic oligonucleotide"
uccagcugugucacagucac

SEQ ID NO: 577 - RNA, 20 nt, Artificial Sequence
  source: /note="Description of Artificial Sequence: Synthetic oligonucleotide"
uuaaauauauuuuaucuuua

SEQ ID NO: 578 - RNA, 20 nt, Artificial Sequence
  source: /note="Description of Artificial Sequence: Synthetic oligonucleotide"
uuuaaauauauuuuaucuuu

SEQ ID NO: 579 - RNA, 19 nt, Artificial Sequence
  source: /note="Description of Artificial Sequence: Synthetic oligonucleotide"
gcacuacacugcccagagu

SEQ ID NO: 580 - RNA, 19 nt, Artificial Sequence
  source: /note="Description of Artificial Sequence: Synthetic oligonucleotide"
gccugugacugugacacag

SEQ ID NO: 581 - RNA, 20 nt, Artificial Sequence
  source: /note="Description of Artificial Sequence: Synthetic oligonucleotide"
ggccugugacugugacacag

SEQ ID NO: 582 - RNA, 18 nt, Artificial Sequence
  source: /note="Description of Artificial Sequence: Synthetic oligonucleotide"
ggugugaucauugcaauu

SEQ ID NO: 583 - RNA, 22 nt, Artificial Sequence
  source: /note="Description of Artificial Sequence: Synthetic oligonucleotide"
gacaccugcagagaaaacuuuu

SEQ ID NO: 584 - RNA, 21 nt, Artificial Sequence
  source: /note="Description of Artificial Sequence: Synthetic oligonucleotide"
gcauuacagacagucccaggg

SEQ ID NO: 585 - RNA, 23 nt, Artificial Sequence
  source: /note="Description of Artificial Sequence: Synthetic oligonucleotide"
gcuuaggugugaucauugcaauu

SEQ ID NO: 586 - RNA, 24 nt, Artificial Sequence
  source: /note="Description of Artificial Sequence: Synthetic oligonucleotide"
gcuucuuuuuugcacuacacugcc

SEQ ID NO: 587 - RNA, 24 nt, Artificial Sequence
  source: /note="Description of Artificial Sequence: Synthetic oligonucleotide"
ggcuuaggugugaucauugcaauu

SEQ ID NO: 588 - RNA, 24 nt, Artificial Sequence
  source: /note="Description of Artificial Sequence: Synthetic oligonucleotide"
guaaggccugugacugugacacag

SEQ ID NO: 589 - RNA, 24 nt, Artificial Sequence
  source: /note="Description of Artificial Sequence: Synthetic oligonucleotide"
gugacaccugcagagaaaacuuuu

SEQ ID NO: 590 - RNA, 19 nt, Artificial Sequence
  source: /note="Description of Artificial Sequence: Synthetic oligonucleotide"
accugcagagaaaacuuuu

SEQ ID NO: 591 - RNA, 20 nt, Artificial Sequence
  source: /note="Description of Artificial Sequence: Synthetic oligonucleotide"
acugcccagagugaggauug

SEQ ID NO: 592 - RNA, 19 nt, Artificial Sequence
  source: /note="Description of Artificial Sequence: Synthetic oligonucleotide"
aggugugaucauugcaauu

SEQ ID NO: 593 - RNA, 19 nt, Artificial Sequence
  source: /note="Description of Artificial Sequence: Synthetic oligonucleotide"
auuacagacagucccaggg

SEQ ID NO: 594 - RNA, 20 nt, Artificial Sequence
  source: /note="Description of Artificial Sequence: Synthetic oligonucleotide"
caccugcagagaaaacuuuu

SEQ ID NO: 595 - RNA, 18 nt, Artificial Sequence
  source: /note="Description of Artificial Sequence: Synthetic oligonucleotide"
cacuacacugcccagagu

SEQ ID NO: 596 - RNA, 20 nt, Artificial Sequence
  source: /note="Description of Artificial Sequence: Synthetic oligonucleotide"
cauuacagacagucccaggg

SEQ ID NO: 597 - RNA, 18 nt, Artificial Sequence
  source: /note="Description of Artificial Sequence: Synthetic oligonucleotide"
ccugcagagaaaacuuuu

SEQ ID NO: 598 - RNA, 18 nt, Artificial Sequence
  source: /note="Description of Artificial Sequence: Synthetic oligonucleotide"
ccugugacugugacacag

SEQ ID NO: 599 - RNA, 19 nt, Artificial Sequence
  source: /note="Description of Artificial Sequence: Synthetic oligonucleotide"
cuccgaagcuuuaaugaug

SEQ ID NO: 600 - RNA, 19 nt, Artificial Sequence
  source: /note="Description of Artificial Sequence: Synthetic oligonucleotide"
cugcccagagugaggauug

SEQ ID NO: 601 - RNA, 20 nt, Artificial Sequence
  source: /note="Description of Artificial Sequence: Synthetic oligonucleotide"
cuuuuuugcacuacacugcc

SEQ ID NO: 602 - RNA, 20 nt, Artificial Sequence
  source: /note="Description of Artificial Sequence: Synthetic oligonucleotide"
uaggugugaucauugcaauu

SEQ ID NO: 603 - RNA, 18 nt, Artificial Sequence
  source: /note="Description of Artificial Sequence: Synthetic oligonucleotide"
uccgaagcuuuaaugaug

SEQ ID NO: 604 - RNA, 20 nt, Artificial Sequence
  source: /note="Description of Artificial Sequence: Synthetic oligonucleotide"
ucuccgaagcuuuaaugaug

SEQ ID NO: 605 - RNA, 20 nt, Artificial Sequence
  source: /note="Description of Artificial Sequence: Synthetic oligonucleotide"
ugcacuacacugcccagagu

SEQ ID NO: 606 - RNA, 18 nt, Artificial Sequence
  source: /note="Description of Artificial Sequence: Synthetic oligonucleotide"
ugcccagagugaggauug

SEQ ID NO: 607 - RNA, 18 nt, Artificial Sequence
  source: /note="Description of Artificial Sequence: Synthetic oligonucleotide"
uuacagacagucccaggg

SEQ ID NO: 608 - RNA, 18 nt, Artificial Sequence
  source: /note="Description of Artificial Sequence: Synthetic oligonucleotide"
uuuuugcacuacacugcc

SEQ ID NO: 609 - RNA, 19 nt, Artificial Sequence
  source: /note="Description of Artificial Sequence: Synthetic oligonucleotide"
uuuuuugcacuacacugcc

SEQ ID NO: 610 - RNA, 22 nt, Artificial Sequence
  source: /note="Description of Artificial Sequence: Synthetic oligonucleotide"
aaggccugugacugugacacag

SEQ ID NO: 611 - RNA, 24 nt, Artificial Sequence
  source: /note="Description of Artificial Sequence: Synthetic oligonucleotide"
aauuucuccgaagcuuuaaugaug

SEQ ID NO: 612 - RNA, 21 nt, Artificial Sequence
  source: /note="Description of Artificial Sequence: Synthetic oligonucleotide"
acaccugcagagaaaacuuuu

SEQ ID NO: 613 - RNA, 22 nt, Artificial Sequence
  source: /note="Description of Artificial Sequence: Synthetic oligonucleotide"
acacugcccagagugaggauug

SEQ ID NO: 614 - RNA, 22 nt, Artificial Sequence
  source: /note="Description of Artificial Sequence: Synthetic oligonucleotide"
agcauuacagacagucccaggg

SEQ ID NO: 615 - RNA, 21 nt, Artificial Sequence
  source: /note="Description of Artificial Sequence: Synthetic oligonucleotide"
aggccugugacugugacacag

SEQ ID NO: 616 - RNA, 23 nt, Artificial Sequence
  source: /note="Description of Artificial Sequence: Synthetic oligonucleotide"
auuucuccgaagcuuuaaugaug

SEQ ID NO: 617 - RNA, 21 nt, Artificial Sequence
  source: /note="Description of Artificial Sequence: Synthetic oligonucleotide"
cacugcccagagugaggauug

SEQ ID NO: 618 - RNA, 24 nt, Artificial Sequence
  source: /note="Description of Artificial Sequence: Synthetic oligonucleotide"
cuacacugcccagagugaggauug

SEQ ID NO: 619 - RNA, 22 nt, Artificial Sequence
  source: /note="Description of Artificial Sequence: Synthetic oligonucleotide"
cuuaggugugaucauugcaauu

SEQ ID NO: 620 - RNA, 23 nt, Artificial Sequence
  source: /note="Description of Artificial Sequence: Synthetic oligonucleotide"
cuucuuuuuugcacuacacugcc

SEQ ID NO: 621 - RNA, 23 nt, Artificial Sequence
  source: /note="Description of Artificial Sequence: Synthetic oligonucleotide"
uaaggccugugacugugacacag

SEQ ID NO: 622 - RNA, 23 nt, Artificial Sequence
  source: /note="Description of Artificial Sequence: Synthetic oligonucleotide"
uacacugcccagagugaggauug

SEQ ID NO: 623 - RNA, 23 nt, Artificial Sequence
  source: /note="Description of Artificial Sequence: Synthetic oligonucleotide"
uagcauuacagacagucccaggg

SEQ ID NO: 624 - RNA, 21 nt, Artificial Sequence
  source: /note="Description of Artificial Sequence: Synthetic oligonucleotide"
ucuuuuuugcacuacacugcc

SEQ ID NO: 625 - RNA, 23 nt, Artificial Sequence
  source: /note="Description of Artificial Sequence: Synthetic oligonucleotide"
ugacaccugcagagaaaacuuuu

SEQ ID NO: 626 - RNA, 24 nt, Artificial Sequence
  source: /note="Description of Artificial Sequence: Synthetic oligonucleotide"
uuagcauuacagacagucccaggg

SEQ ID NO: 627 - RNA, 21 nt, Artificial Sequence
  source: /note="Description of Artificial Sequence: Synthetic oligonucleotide"
uuaggugugaucauugcaauu

SEQ ID NO: 628 - RNA, 21 nt, Artificial Sequence
  source: /note="Description of Artificial Sequence: Synthetic oligonucleotide"
uucuccgaagcuuuaaugaug

SEQ ID NO: 629 - RNA, 22 nt, Artificial Sequence
  source: /note="Description of Artificial Sequence: Synthetic oligonucleotide"
uucuuuuuugcacuacacugcc

SEQ ID NO: 630 - RNA, 21 nt, Artificial Sequence
  source: /note="Description of Artificial Sequence: Synthetic oligonucleotide"
uugcacuacacugcccagagu

SEQ ID NO: 631 - RNA, 22 nt, Artificial Sequence
  source: /note="Description of Artificial Sequence: Synthetic oligonucleotide"
uuucuccgaagcuuuaaugaug

SEQ ID NO: 632 - RNA, 22 nt, Artificial Sequence
  source: /note="Description of Artificial Sequence: Synthetic oligonucleotide"
uuugcacuacacugcccagagu

SEQ ID NO: 633 - RNA, 23 nt, Artificial Sequence
  source: /note="Description of Artificial Sequence: Synthetic oligonucleotide"
uuuugcacuacacugcccagagu

SEQ ID NO: 634 - RNA, 24 nt, Artificial Sequence
  source: /note="Description of Artificial Sequence: Synthetic oligonucleotide"
uuuuugcacuacacugcccagagu

SEQ ID NO: 635 - RNA, 21 nt, Artificial Sequence
  source: /note="Description of Artificial Sequence: Synthetic oligonucleotide"
gauaaaauauauuuaaaaggu

SEQ ID NO: 636 - RNA, 20 nt, Artificial Sequence
  source: /note="Description of Artificial Sequence: Synthetic oligonucleotide"
auaaaauauauuuaaaaggu

SEQ ID NO: 637 - RNA, 19 nt, Artificial Sequence
  source: /note="Description of Artificial Sequence: Synthetic oligonucleotide"
uaaaauauauuuaaaaggu

SEQ ID NO: 638 - RNA, 18 nt, Artificial Sequence
  source: /note="Description of Artificial Sequence: Synthetic oligonucleotide"
aaaauauauuuaaaaggu

SEQ ID NO: 639 - RNA, 24 nt, Artificial Sequence
  source: /note="Description of Artificial Sequence: Synthetic oligonucleotide"
aaagauaaaauauauuuaaaaggu

SEQ ID NO: 640 - RNA, 23 nt, Artificial Sequence
  source: /note="Description of Artificial Sequence: Synthetic oligonucleotide"
aagauaaaauauauuuaaaaggu

SEQ ID NO: 641 - RNA, 22 nt, Artificial Sequence
  source: /note="Description of Artificial Sequence: Synthetic oligonucleotide"
agauaaaauauauuuaaaaggu

SEQ ID NO: 642 - RNA, 20 nt, Artificial Sequence
  source: /note="Description of Artificial Sequence: Synthetic oligonucleotide"
auauauuuaaaaggugagga

SEQ ID NO: 643 - RNA, 19 nt, Artificial Sequence
  source: /note="Description of Artificial Sequence: Synthetic oligonucleotide"
uauauuuaaaaggugagga

SEQ ID NO: 644 - RNA, 18 nt, Artificial Sequence
  source: /note="Description of Artificial Sequence: Synthetic oligonucleotide"
auauuuaaaaggugagga

SEQ ID NO: 645 - RNA, 20 nt, Artificial Sequence
  source: /note="Description of Artificial Sequence: Synthetic oligonucleotide"
uuuucucugcaggugucaca

SEQ ID NO: 646 - RNA, 19 nt, Artificial Sequence
  source: /note="Description of Artificial Sequence: Synthetic oligonucleotide"
uuucucugcaggugucaca

SEQ ID NO: 647 - RNA, 18 nt, Artificial Sequence
  source: /note="Description of Artificial Sequence: Synthetic oligonucleotide"
uucucugcaggugucaca

SEQ ID NO: 648 - RNA, 20 nt, Artificial Sequence
  source: /note="Description of Artificial Sequence: Synthetic oligonucleotide"
ugcacugucucccuucaaca

SEQ ID NO: 649 - RNA, 19 nt, Artificial Sequence
  source: /note="Description of Artificial Sequence: Synthetic oligonucleotide"
gcacugucucccuucaaca

SEQ ID NO: 650 - RNA, 18 nt, Artificial Sequence
  source: /note="Description of Artificial Sequence: Synthetic oligonucleotide"
cacugucucccuucaaca

SEQ ID NO: 651 - RNA, 20 nt, Artificial Sequence
  source: /note="Description of Artificial Sequence: Synthetic oligonucleotide"
gugcaucugcaagcccaaug

SEQ ID NO: 652 - RNA, 19 nt, Artificial Sequence
  source: /note="Description of Artificial Sequence: Synthetic oligonucleotide"
ugcaucugcaagcccaaug

SEQ ID NO: 653 - RNA, 18 nt, Artificial Sequence
  source: /note="Description of Artificial Sequence: Synthetic oligonucleotide"
gcaucugcaagcccaaug

SEQ ID NO: 654 - RNA, 20 nt, Artificial Sequence
  source: /note="Description of Artificial Sequence: Synthetic oligonucleotide"
caaauucugcaauccucacu

SEQ ID NO: 655 - RNA, 19 nt, Artificial Sequence
  source: /note="Description of Artificial Sequence: Synthetic oligonucleotide"
aaauucugcaauccucacu

SEQ ID NO: 656 - RNA, 18 nt, Artificial Sequence
  source: /note="Description of Artificial Sequence: Synthetic oligonucleotide"
aauucugcaauccucacu

SEQ ID NO: 657 - RNA, 20 nt, Artificial Sequence
  source: /note="Description of Artificial Sequence: Synthetic oligonucleotide"
ucugcaagcccaauguugaa

SEQ ID NO: 658 - RNA, 19 nt, Artificial Sequence
  source: /note="Description of Artificial Sequence: Synthetic oligonucleotide"
cugcaagcccaauguugaa

SEQ ID NO: 659 - RNA, 18 nt, Artificial Sequence
  source: /note="Description of Artificial Sequence: Synthetic oligonucleotide"
ugcaagcccaauguugaa

SEQ ID NO: 660 - RNA, 20 nt, Artificial Sequence
  source: /note="Description of Artificial Sequence: Synthetic oligonucleotide"
uuagcauuacagacaguccc

SEQ ID NO: 661 - RNA, 19 nt, Artificial Sequence
  source: /note="Description of Artificial Sequence: Synthetic oligonucleotide"
uagcauuacagacaguccc

SEQ ID NO: 662 - RNA, 18 nt, Artificial Sequence
  source: /note="Description of Artificial Sequence: Synthetic oligonucleotide"
agcauuacagacaguccc

SEQ ID NO: 663 - RNA, 20 nt, Artificial Sequence
  source: /note="Description of Artificial Sequence: Synthetic oligonucleotide"
gacagugcaauaaauguuug

SEQ ID NO: 664 - RNA, 19 nt, Artificial Sequence
  source: /note="Description of Artificial Sequence: Synthetic oligonucleotide"
acagugcaauaaauguuug

SEQ ID NO: 665 - RNA, 18 nt, Artificial Sequence
  source: /note="Description of Artificial Sequence: Synthetic oligonucleotide"
cagugcaauaaauguuug

SEQ ID NO: 666 - RNA, 20 nt, Artificial Sequence
  source: /note="Description of Artificial Sequence: Synthetic oligonucleotide"
ugacacagcuggaucccucc

SEQ ID NO: 667 - RNA, 19 nt, Artificial Sequence
  source: /note="Description of Artificial Sequence: Synthetic oligonucleotide"
gacacagcuggaucccucc

SEQ ID NO: 668 - RNA, 18 nt, Artificial Sequence
  source: /note="Description of Artificial Sequence: Synthetic oligonucleotide"
acacagcuggaucccucc

SEQ ID NO: 669 - RNA, 20 nt, Artificial Sequence
  source: /note="Description of Artificial Sequence: Synthetic oligonucleotide"
cuuagcauuacagacagucc

SEQ ID NO: 670 - RNA, 19 nt, Artificial Sequence
  source: /note="Description of Artificial Sequence: Synthetic oligonucleotide"
uuagcauuacagacagucc

SEQ ID NO: 671 - RNA, 18 nt, Artificial Sequence
  source: /note="Description of Artificial Sequence: Synthetic oligonucleotide"
uagcauuacagacagucc

SEQ ID NO: 672 - RNA, 20 nt, Artificial Sequence
  source: /note="Description of Artificial Sequence: Synthetic oligonucleotide"
aauuuuggauuuaaauuucu

SEQ ID NO: 673 - RNA, 19 nt, Artificial Sequence
  source: /note="Description of Artificial Sequence: Synthetic oligonucleotide"
auuuuggauuuaaauuucu

SEQ ID NO: 674 - RNA, 18 nt, Artificial Sequence
  source: /note="Description of Artificial Sequence: Synthetic oligonucleotide"
uuuuggauuuaaauuucu

SEQ ID NO: 675 - RNA, 20 nt, Artificial Sequence
  source: /note="Description of Artificial Sequence: Synthetic oligonucleotide"
uuugcacuacacugcccaga

SEQ ID NO: 676 - RNA, 19 nt, Artificial Sequence
  source: /note="Description of Artificial Sequence: Synthetic oligonucleotide"
uugcacuacacugcccaga

SEQ ID NO: 677 - RNA, 18 nt, Artificial Sequence
  source: /note="Description of Artificial Sequence: Synthetic oligonucleotide"
ugcacuacacugcccaga

SEQ ID NO: 678 - RNA, 20 nt, Artificial Sequence
  source: /note="Description of Artificial Sequence: Synthetic oligonucleotide"
ggagacagugcaauaaaugu

SEQ ID NO: 679 - RNA, 19 nt, Artificial Sequence
  source: /note="Description of Artificial Sequence: Synthetic oligonucleotide"
gagacagugcaauaaaugu

SEQ ID NO: 680 - RNA, 18 nt, Artificial Sequence
  source: /note="Description of Artificial Sequence: Synthetic oligonucleotide"
agacagugcaauaaaugu

SEQ ID NO: 681 - RNA, 20 nt, Artificial Sequence
  source: /note="Description of Artificial Sequence: Synthetic oligonucleotide"
aaugauuucauucaagauag

SEQ ID NO: 682 - RNA, 19 nt, Artificial Sequence
  source: /note="Description of Artificial Sequence: Synthetic oligonucleotide"
augauuucauucaagauag

SEQ ID NO: 683 - RNA, 18 nt, Artificial Sequence
  source: /note="Description of Artificial Sequence: Synthetic oligonucleotide"
ugauuucauucaagauag

SEQ ID NO: 684 - RNA, 20 nt, Artificial Sequence
  source: /note="Description of Artificial Sequence: Synthetic oligonucleotide"
acagugcaauaaauguuugg

SEQ ID NO: 685 - RNA, 19 nt, Artificial Sequence
  source: /note="Description of Artificial Sequence: Synthetic oligonucleotide"
cagugcaauaaauguuugg

SEQ ID NO: 686 - RNA, 18 nt, Artificial Sequence
  source: /note="Description of Artificial Sequence: Synthetic oligonucleotide"
agugcaauaaauguuugg

SEQ ID NO: 687 - RNA, 20 nt, Artificial Sequence
  source: /note="Description of Artificial Sequence: Synthetic oligonucleotide"
agauaaaauauauuuaaaag

SEQ ID NO: 688 - RNA, 19 nt, Artificial Sequence
  source: /note="Description of Artificial Sequence: Synthetic oligonucleotide"
gauaaaauauauuuaaaag

SEQ ID NO: 689 - RNA, 18 nt, Artificial Sequence
  source: /note="Description of Artificial Sequence: Synthetic oligonucleotide"
auaaaauauauuuaaaag

SEQ ID NO: 690 - RNA, 20 nt, Artificial Sequence
  source: /note="Description of Artificial Sequence: Synthetic oligonucleotide"
uauauuuaaaaggugaggau

SEQ ID NO: 691 - RNA, 19 nt, Artificial Sequence
  source: /note="Description of Artificial Sequence: Synthetic oligonucleotide"
auauuuaaaaggugaggau

SEQ ID NO: 692 - RNA, 18 nt, Artificial Sequence
  source: /note="Description of Artificial Sequence: Synthetic oligonucleotide"
uauuuaaaaggugaggau

SEQ ID NO: 693 - RNA, 20 nt, Artificial Sequence
  source: /note="Description of Artificial Sequence: Synthetic oligonucleotide"
cugggcaguguagugcaaaa

SEQ ID NO: 694 - RNA, 19 nt, Artificial Sequence
  source: /note="Description of Artificial Sequence: Synthetic oligonucleotide"
ugggcaguguagugcaaaa

SEQ ID NO: 695 - RNA, 18 nt, Artificial Sequence
  source: /note="Description of Artificial Sequence: Synthetic oligonucleotide"
gggcaguguagugcaaaa

SEQ ID NO: 696 - RNA, 20 nt, Artificial Sequence
  source: /note="Description of Artificial Sequence: Synthetic oligonucleotide"
ccaacaucauuaaagcuucg

SEQ ID NO: 697 - RNA, 19 nt, Artificial Sequence
  source: /note="Description of Artificial Sequence: Synthetic oligonucleotide"
caacaucauuaaagcuucg

SEQ ID NO: 698 - RNA, 18 nt, Artificial Sequence
  source: /note="Description of Artificial Sequence: Synthetic oligonucleotide"
aacaucauuaaagcuucg

SEQ ID NO: 699 - RNA, 20 nt, Artificial Sequence
  source: /note="Description of Artificial Sequence: Synthetic oligonucleotide"
uugugucucgucuaucuuga

SEQ ID NO: 700 - RNA, 19 nt, Artificial Sequence
  source: /note="Description of Artificial Sequence: Synthetic oligonucleotide"
ugugucucgucuaucuuga

SEQ ID NO: 701 - RNA, 18 nt, Artificial Sequence
  source: /note="Description of Artificial Sequence: Synthetic oligonucleotide"
gugucucgucuaucuuga

SEQ ID NO: 702 - RNA, 20 nt, Artificial Sequence
  source: /note="Description of Artificial Sequence: Synthetic oligonucleotide"
uagcauuacagacaguccca

SEQ ID NO: 703 - RNA, 19 nt, Artificial Sequence
  source: /note="Description of Artificial Sequence: Synthetic oligonucleotide"
agcauuacagacaguccca

SEQ ID NO: 704 - RNA, 18 nt, Artificial Sequence
  source: /note="Description of Artificial Sequence: Synthetic oligonucleotide"
gcauuacagacaguccca

SEQ ID NO: 705 - RNA, 20 nt, Artificial Sequence
  source: /note="Description of Artificial Sequence: Synthetic oligonucleotide"
aucugcaagcccaauguuga

SEQ ID NO: 706 - RNA, 19 nt, Artificial Sequence
  source: /note="Description of Artificial Sequence: Synthetic oligonucleotide"
ucugcaagcccaauguuga

SEQ ID NO: 707 - RNA, 18 nt, Artificial Sequence
  source: /note="Description of Artificial Sequence: Synthetic oligonucleotide"
cugcaagcccaauguuga

SEQ ID NO: 708 - RNA, 20 nt, Artificial Sequence
  source: /note="Description of Artificial Sequence: Synthetic oligonucleotide"
uuuuaaauauauuuuaucuu

SEQ ID NO: 709 - RNA, 19 nt, Artificial Sequence
  source: /note="Description of Artificial Sequence: Synthetic oligonucleotide"
uuuaaauauauuuuaucuu

SEQ ID NO: 710 - RNA, 18 nt, Artificial Sequence
  source: /note="Description of Artificial Sequence: Synthetic oligonucleotide"
uuaaauauauuuuaucuu

SEQ ID NO: 711 - RNA, 20 nt, Artificial Sequence
  source: /note="Description of Artificial Sequence: Synthetic oligonucleotide"
cauccaacaucauuaaagcu

SEQ ID NO: 712 - RNA, 19 nt, Artificial Sequence
  source: /note="Description of Artificial Sequence: Synthetic oligonucleotide"
auccaacaucauuaaagcu

SEQ ID NO: 713 - RNA, 18 nt, Artificial Sequence
  source: /note="Description of Artificial Sequence: Synthetic oligonucleotide"
uccaacaucauuaaagcu

SEQ ID NO: 714 - RNA, 20 nt, Artificial Sequence
  source: /note="Description of Artificial Sequence: Synthetic oligonucleotide"
gcauuacagacagucccagg

SEQ ID NO: 715 - RNA, 19 nt, Artificial Sequence
  source: /note="Description of Artificial Sequence: Synthetic oligonucleotide"
cauuacagacagucccagg

SEQ ID NO: 716 - RNA, 18 nt, Artificial Sequence
  source: /note="Description of Artificial Sequence: Synthetic oligonucleotide"
auuacagacagucccagg

SEQ ID NO: 717 - RNA, 20 nt, Artificial Sequence
  source: /note="Description of Artificial Sequence: Synthetic oligonucleotide"
cagaauuuguucacugagcc

SEQ ID NO: 718 - RNA, 19 nt, Artificial Sequence
  source: /note="Description of Artificial Sequence: Synthetic oligonucleotide"
agaauuuguucacugagcc

SEQ ID NO: 719 - RNA, 18 nt, Artificial Sequence
  source: /note="Description of Artificial Sequence: Synthetic oligonucleotide"
gaauuuguucacugagcc

SEQ ID NO: 720 - RNA, 20 nt, Artificial Sequence
  source: /note="Description of Artificial Sequence: Synthetic oligonucleotide"
acuucagugugacaccugca

SEQ ID NO: 721 - RNA, 19 nt, Artificial Sequence
  source: /note="Description of Artificial Sequence: Synthetic oligonucleotide"
cuucagugugacaccugca

SEQ ID NO: 722 - RNA, 18 nt, Artificial Sequence
  source: /note="Description of Artificial Sequence: Synthetic oligonucleotide"
uucagugugacaccugca

SEQ ID NO: 723 - RNA, 20 nt, Artificial Sequence
  source: /note="Description of Artificial Sequence: Synthetic oligonucleotide"
cagugcaauaaauguuugga

SEQ ID NO: 724 - RNA, 19 nt, Artificial Sequence
  source: /note="Description of Artificial Sequence: Synthetic oligonucleotide"
agugcaauaaauguuugga

SEQ ID NO: 725 - RNA, 18 nt, Artificial Sequence
  source: /note="Description of Artificial Sequence: Synthetic oligonucleotide"
gugcaauaaauguuugga

SEQ ID NO: 726 - RNA, 20 nt, Artificial Sequence
  source: /note="Description of Artificial Sequence: Synthetic oligonucleotide"
gagacagugcaauaaauguu

SEQ ID NO: 727 - RNA, 19 nt, Artificial Sequence
  source: /note="Description of Artificial Sequence: Synthetic oligonucleotide"
agacagugcaauaaauguu

SEQ ID NO: 728 - RNA, 18 nt, Artificial Sequence
  source: /note="Description of Artificial Sequence: Synthetic oligonucleotide"
gacagugcaauaaauguu

SEQ ID NO: 729 - RNA, 20 nt, Artificial Sequence
  source: /note="Description of Artificial Sequence: Synthetic oligonucleotide"
aagcuuuaaugauguuggau

SEQ ID NO: 730 - RNA, 19 nt, Artificial Sequence
  source: /note="Description of Artificial Sequence: Synthetic oligonucleotide"
agcuuuaaugauguuggau

SEQ ID NO: 731 - RNA, 18 nt, Artificial Sequence
  source: /note="Description of Artificial Sequence: Synthetic oligonucleotide"
gcuuuaaugauguuggau

SEQ ID NO: 732 - RNA, 20 nt, Artificial Sequence
  source: /note="Description of Artificial Sequence: Synthetic oligonucleotide"
aauauauuuaaaaggugagg

SEQ ID NO: 733 - RNA, 19 nt, Artificial Sequence
  source: /note="Description of Artificial Sequence: Synthetic oligonucleotide"
auauauuuaaaaggugagg

SEQ ID NO: 734 - RNA, 18 nt, Artificial Sequence
  source: /note="Description of Artificial Sequence: Synthetic oligonucleotide"
uauauuuaaaaggugagg

SEQ ID NO: 735 - RNA, 20 nt, Artificial Sequence
  source: /note="Description of Artificial Sequence: Synthetic oligonucleotide"
ggacuucagugugacaccug

SEQ ID NO: 736 - RNA, 19 nt, Artificial Sequence
  source: /note="Description of Artificial Sequence: Synthetic oligonucleotide"
gacuucagugugacaccug

SEQ ID NO: 737 - RNA, 18 nt, Artificial Sequence
  source: /note="Description of Artificial Sequence: Synthetic oligonucleotide"
acuucagugugacaccug

SEQ ID NO: 738 - RNA, 20 nt, Artificial Sequence
  source: /note="Description of Artificial Sequence: Synthetic oligonucleotide"
auccaacaucauuaaagcuu

SEQ ID NO: 739 - RNA, 19 nt, Artificial Sequence
  source: /note="Description of Artificial Sequence: Synthetic oligonucleotide"
uccaacaucauuaaagcuu

SEQ ID NO: 740 - RNA, 18 nt, Artificial Sequence
  source: /note="Description of Artificial Sequence: Synthetic oligonucleotide"
ccaacaucauuaaagcuu

SEQ ID NO: 741 - RNA, 20 nt, Artificial Sequence
  source: /note="Description of Artificial Sequence: Synthetic oligonucleotide"
aguguaaccuccauggcuca

SEQ ID NO: 742 - RNA, 19 nt, Artificial Sequence
  source: /note="Description of Artificial Sequence: Synthetic oligonucleotide"
guguaaccuccauggcuca

SEQ ID NO: 743 - RNA, 18 nt, Artificial Sequence
  source: /note="Description of Artificial Sequence: Synthetic oligonucleotide"
uguaaccuccauggcuca

SEQ ID NO: 744 - RNA, 20 nt, Artificial Sequence
  source: /note="Description of Artificial Sequence: Synthetic oligonucleotide"
agaauuuguucacugagcca

SEQ ID NO: 745 - RNA, 19 nt, Artificial Sequence
  source: /note="Description of Artificial Sequence: Synthetic oligonucleotide"
gaauuuguucacugagcca

SEQ ID NO: 746 - RNA, 18 nt, Artificial Sequence
  source: /note="Description of Artificial Sequence: Synthetic oligonucleotide"
aauuuguucacugagcca

SEQ ID NO: 747 - RNA, 20 nt, Artificial Sequence
  source: /note="Description of Artificial Sequence: Synthetic oligonucleotide"
guagugcaaaaaagaagcca

SEQ ID NO: 748 - RNA, 19 nt, Artificial Sequence
  source: /note="Description of Artificial Sequence: Synthetic oligonucleotide"
uagugcaaaaaagaagcca

SEQ ID NO: 749 - RNA, 18 nt, Artificial Sequence
  source: /note="Description of Artificial Sequence: Synthetic oligonucleotide"
agugcaaaaaagaagcca

SEQ ID NO: 750 - RNA, 20 nt, Artificial Sequence
  source: /note="Description of Artificial Sequence: Synthetic oligonucleotide"
caucugcaagcccaauguug

SEQ ID NO: 751 - RNA, 19 nt, Artificial Sequence
  source: /note="Description of Artificial Sequence: Synthetic oligonucleotide"
aucugcaagcccaauguug

SEQ ID NO: 752 - RNA, 18 nt, Artificial Sequence
  source: /note="Description of Artificial Sequence: Synthetic oligonucleotide"
ucugcaagcccaauguug

SEQ ID NO: 753 - RNA, 20 nt, Artificial Sequence
  source: /note="Description of Artificial Sequence: Synthetic oligonucleotide"
gacugucuguaaugcuaaga

SEQ ID NO: 754 - RNA, 19 nt, Artificial Sequence
  source: /note="Description of Artificial Sequence: Synthetic oligonucleotide"
acugucuguaaugcuaaga

SEQ ID NO: 755 - RNA, 18 nt, Artificial Sequence
  source: /note="Description of Artificial Sequence: Synthetic oligonucleotide"
cugucuguaaugcuaaga

SEQ ID NO: 756 - RNA, 20 nt, Artificial Sequence
  source: /note="Description of Artificial Sequence: Synthetic oligonucleotide"
gacacagcuggaucccuccc

SEQ ID NO: 757 - RNA, 19 nt, Artificial Sequence
  source: /note="Description of Artificial Sequence: Synthetic oligonucleotide"
acacagcuggaucccuccc

SEQ ID NO: 758 - RNA, 18 nt, Artificial Sequence
  source: /note="Description of Artificial Sequence: Synthetic oligonucleotide"
cacagcuggaucccuccc

SEQ ID NO: 759 - RNA, 20 nt, Artificial Sequence
  source: /note="Description of Artificial Sequence: Synthetic oligonucleotide"
aggauugcagaauuuguuca

SEQ ID NO: 760 - RNA, 19 nt, Artificial Sequence
  source: /note="Description of Artificial Sequence: Synthetic oligonucleotide"
ggauugcagaauuuguuca

SEQ ID NO: 761 - RNA, 18 nt, Artificial Sequence
  source: /note="Description of Artificial Sequence: Synthetic oligonucleotide"
gauugcagaauuuguuca

SEQ ID NO: 762 - RNA, 20 nt, Artificial Sequence
  source: /note="Description of Artificial Sequence: Synthetic oligonucleotide"
agccauggagguuacacugg

SEQ ID NO: 763 - RNA, 19 nt, Artificial Sequence
  source: /note="Description of Artificial Sequence: Synthetic oligonucleotide"
gccauggagguuacacugg

SEQ ID NO: 764 - RNA, 18 nt, Artificial Sequence
  source: /note="Description of Artificial Sequence: Synthetic oligonucleotide"
ccauggagguuacacugg

SEQ ID NO: 765 - RNA, 24 nt, Artificial Sequence
  source: /note="Description of Artificial Sequence: Synthetic oligonucleotide"
cucacauccaacaucauuaaagcu

SEQ ID NO: 766 - RNA, 23 nt, Artificial Sequence
  source: /note="Description of Artificial Sequence: Synthetic oligonucleotide"
ucacauccaacaucauuaaagcu

SEQ ID NO: 767 - RNA, 22 nt, Artificial Sequence
  source: /note="Description of Artificial Sequence: Synthetic oligonucleotide"
cacauccaacaucauuaaagcu

SEQ ID NO: 768 - RNA, 21 nt, Artificial Sequence
  source: /note="Description of Artificial Sequence: Synthetic oligonucleotide"
acauccaacaucauuaaagcu

SEQ ID NO: 769 - RNA, 24 nt, Artificial Sequence
  source: /note="Description of Artificial Sequence: Synthetic oligonucleotide"
auugcagaauuuguucacugagcc

SEQ ID NO: 770 - RNA, 23 nt, Artificial Sequence
  source: /note="Description of Artificial Sequence: Synthetic oligonucleotide"
uugcagaauuuguucacugagcc

SEQ ID NO: 771 - RNA, 22 nt, Artificial Sequence
  source: /note="Description of Artificial Sequence: Synthetic oligonucleotide"
ugcagaauuuguucacugagcc

SEQ ID NO: 772 - RNA, 21 nt, Artificial Sequence
  source: /note="Description of Artificial Sequence: Synthetic oligonucleotide"
gcagaauuuguucacugagcc

SEQ ID NO: 773 - RNA, 24 nt, Artificial Sequence
  source: /note="Description of Artificial Sequence: Synthetic oligonucleotide"
cugggacugucuguaaugcuaaga

SEQ ID NO: 774 - RNA, 23 nt, Artificial Sequence
  source: /note="Description of Artificial Sequence: Synthetic oligonucleotide"
ugggacugucuguaaugcuaaga

SEQ ID NO: 775 - RNA, 22 nt, Artificial Sequence
  source: /note="Description of Artificial Sequence: Synthetic oligonucleotide"
gggacugucuguaaugcuaaga

SEQ ID NO: 776 - RNA, 21 nt, Artificial Sequence
  source: /note="Description of Artificial Sequence: Synthetic oligonucleotide"
ggacugucuguaaugcuaaga

SEQ ID NO: 777 - RNA, 24 nt, Artificial Sequence
  source: /note="Description of Artificial Sequence: Synthetic oligonucleotide"
uugcagaauuuguucacugagcca

SEQ ID NO: 778 - RNA, 23 nt, Artificial Sequence
  source: /note="Description of Artificial Sequence: Synthetic oligonucleotide"
ugcagaauuuguucacugagcca

SEQ ID NO: 779 - RNA, 22 nt, Artificial Sequence
  source: /note="Description of Artificial Sequence: Synthetic oligonucleotide"
gcagaauuuguucacugagcca

SEQ ID NO: 780 - RNA, 21 nt, Artificial Sequence
  source: /note="Description of Artificial Sequence: Synthetic oligonucleotide"
cagaauuuguucacugagcca

SEQ ID NO: 781 - RNA, 24 nt, Artificial Sequence
  source: /note="Description of Artificial Sequence: Synthetic oligonucleotide"
gaagggagacagugcaauaaaugu

SEQ ID NO: 782 - RNA, 23 nt, Artificial Sequence
  source: /note="Description of Artificial Sequence: Synthetic oligonucleotide"
aagggagacagugcaauaaaugu

SEQ ID NO: 783 - RNA, 22 nt, Artificial Sequence
  source: /note="Description of Artificial Sequence: Synthetic oligonucleotide"
agggagacagugcaauaaaugu

SEQ ID NO: 784 - RNA, 21 nt, Artificial Sequence
  source: /note="Description of Artificial Sequence: Synthetic oligonucleotide"
gggagacagugcaauaaaugu

SEQ ID NO: 785 - RNA, 24 nt, Artificial Sequence
  source: /note="Description of Artificial Sequence: Synthetic oligonucleotide"
aaaguuuucucugcaggugucaca

SEQ ID NO: 786 - RNA, 23 nt, Artificial Sequence
  source: /note="Description of Artificial Sequence: Synthetic oligonucleotide"
aaguuuucucugcaggugucaca

SEQ ID NO: 787 - RNA, 22 nt, Artificial Sequence
  source: /note="Description of Artificial Sequence: Synthetic oligonucleotide"
aguuuucucugcaggugucaca

SEQ ID NO: 788 - RNA, 21 nt, Artificial Sequence
  source: /note="Description of Artificial Sequence: Synthetic oligonucleotide"
guuuucucugcaggugucaca

SEQ ID NO: 789 - RNA, 24 nt, Artificial Sequence
  source: /note="Description of Artificial Sequence: Synthetic oligonucleotide"
cuuagcauuacagacagucccagg

SEQ ID NO: 790 - RNA, 23 nt, Artificial Sequence
  source: /note="Description of Artificial Sequence: Synthetic oligonucleotide"
uuagcauuacagacagucccagg

SEQ ID NO: 791 - RNA, 22 nt, Artificial Sequence
  source: /note="Description of Artificial Sequence: Synthetic oligonucleotide"
uagcauuacagacagucccagg

SEQ ID NO: 792 - RNA, 21 nt, Artificial Sequence
  source: /note="Description of Artificial Sequence: Synthetic oligonucleotide"
agcauuacagacagucccagg

SEQ ID NO: 793 - RNA, 24 nt, Artificial Sequence
  source: /note="Description of Artificial Sequence: Synthetic oligonucleotide"
cuaaagauaaaauauauuuaaaag

SEQ ID NO: 794 - RNA, 23 nt, Artificial Sequence
  source: /note="Description of Artificial Sequence: Synthetic oligonucleotide"
uaaagauaaaauauauuuaaaag

SEQ ID NO: 795 - RNA, 22 nt, Artificial Sequence
  source: /note="Description of Artificial Sequence: Synthetic oligonucleotide"
aaagauaaaauauauuuaaaag

SEQ ID NO: 796 - RNA, 21 nt, Artificial Sequence
  source: /note="Description of Artificial Sequence: Synthetic oligonucleotide"
aagauaaaauauauuuaaaag

SEQ ID NO: 797 - RNA, 24 nt, Artificial Sequence
  source: /note="Description of Artificial Sequence: Synthetic oligonucleotide"
ugcaucugcaagcccaauguugaa

SEQ ID NO: 798 - RNA, 23 nt, Artificial Sequence
  source: /note="Description of Artificial Sequence: Synthetic oligonucleotide"
gcaucugcaagcccaauguugaa

SEQ ID NO: 799 - RNA, 22 nt, Artificial Sequence
  source: /note="Description of Artificial Sequence: Synthetic oligonucleotide"
caucugcaagcccaauguugaa

SEQ ID NO: 800 - RNA, 21 nt, Artificial Sequence
  source: /note="Description of Artificial Sequence: Synthetic oligonucleotide"
aucugcaagcccaauguugaa

SEQ ID NO: 801 - RNA, 24 nt, Artificial Sequence
  source: /note="Description of Artificial Sequence: Synthetic oligonucleotide"
acugagccauggagguuacacugg

SEQ ID NO: 802 - RNA, 23 nt, Artificial Sequence
  source: /note="Description of Artificial Sequence: Synthetic oligonucleotide"
cugagccauggagguuacacugg

SEQ ID NO: 803 - RNA, 22 nt, Artificial Sequence
  source: /note="Description of Artificial Sequence: Synthetic oligonucleotide"
ugagccauggagguuacacugg

SEQ ID NO: 804 - RNA, 21 nt, Artificial Sequence
  source: /note="Description of Artificial Sequence: Synthetic oligonucleotide"
gagccauggagguuacacugg

SEQ ID NO: 805 - RNA, 24 nt, Artificial Sequence
  source: /note="Description of Artificial Sequence: Synthetic oligonucleotide"
aaggacuucagugugacaccugca

SEQ ID NO: 806 - RNA, 23 nt, Artificial Sequence
  source: /note="Description of Artificial Sequence: Synthetic oligonucleotide"
aggacuucagugugacaccugca

SEQ ID NO: 807 - RNA, 22 nt, Artificial Sequence
  source: /note="Description of Artificial Sequence: Synthetic oligonucleotide"
ggacuucagugugacaccugca

SEQ ID NO: 808 - RNA, 21 nt, Artificial Sequence
  source: /note="Description of Artificial Sequence: Synthetic oligonucleotide"
gacuucagugugacaccugca

SEQ ID NO: 809 - RNA, 24 nt, Artificial Sequence
  source: /note="Description of Artificial Sequence: Synthetic oligonucleotide"
agugaggauugcagaauuuguuca

SEQ ID NO: 810 - RNA, 23 nt, Artificial Sequence
  source: /note="Description of Artificial Sequence: Synthetic oligonucleotide"
gugaggauugcagaauuuguuca

SEQ ID NO: 811 - RNA, 22 nt, Artificial Sequence
  source: /note="Description of Artificial Sequence: Synthetic oligonucleotide"
ugaggauugcagaauuuguuca

SEQ ID NO: 812 - RNA, 21 nt, Artificial Sequence
  source: /note="Description of Artificial Sequence: Synthetic oligonucleotide"
gaggauugcagaauuuguuca

SEQ ID NO: 813 - RNA, 24 nt, Artificial Sequence
  source: /note="Description of Artificial Sequence: Synthetic oligonucleotide"
uaaaauauauuuaaaaggugagga

SEQ ID NO: 814 - RNA, 23 nt, Artificial Sequence
  source: /note="Description of Artificial Sequence: Synthetic oligonucleotide"
aaaauauauuuaaaaggugagga

SEQ ID NO: 815 - RNA, 22 nt, Artificial Sequence
  source: /note="Description of Artificial Sequence: Synthetic oligonucleotide"
aaauauauuuaaaaggugagga

SEQ ID NO: 816 - RNA, 21 nt, Artificial Sequence
  source: /note="Description of Artificial Sequence: Synthetic oligonucleotide"
aauauauuuaaaaggugagga

SEQ ID NO: 817 - RNA, 24 nt, Artificial Sequence
  source: /note="Description of Artificial Sequence: Synthetic oligonucleotide"
cugugacacagcuggaucccuccc

SEQ ID NO: 818 - RNA, 23 nt, Artificial Sequence
  source: /note="Description of Artificial Sequence: Synthetic oligonucleotide"
ugugacacagcuggaucccuccc

SEQ ID NO: 819 - RNA, 22 nt, Artificial Sequence
  source: /note="Description of Artificial Sequence: Synthetic oligonucleotide"
gugacacagcuggaucccuccc

SEQ ID NO: 820 - RNA, 21 nt, Artificial Sequence
  source: /note="Description of Artificial Sequence: Synthetic oligonucleotide"
ugacacagcuggaucccuccc

SEQ ID NO: 821 - RNA, 24 nt, Artificial Sequence
  source: /note="Description of Artificial Sequence: Synthetic oligonucleotide"
cugucuuagcauuacagacagucc

SEQ ID NO: 822 - RNA, 23 nt, Artificial Sequence
  source: /note="Description of Artificial Sequence: Synthetic oligonucleotide"
ugucuuagcauuacagacagucc

SEQ ID NO: 823 - RNA, 22 nt, Artificial Sequence
  source: /note="Description of Artificial Sequence: Synthetic oligonucleotide"
gucuuagcauuacagacagucc

SEQ ID NO: 824 - RNA, 21 nt, Artificial Sequence
  source: /note="Description of Artificial Sequence: Synthetic oligonucleotide"
ucuuagcauuacagacagucc

SEQ ID NO: 825 - RNA, 24 nt, Artificial Sequence
  source: /note="Description of Artificial Sequence: Synthetic oligonucleotide"
ugaacaaauucugcaauccucacu

SEQ ID NO: 826 - RNA, 23 nt, Artificial Sequence
  source: /note="Description of Artificial Sequence: Synthetic oligonucleotide"
gaacaaauucugcaauccucacu

SEQ ID NO: 827 - RNA, 22 nt, Artificial Sequence
  source: /note="Description of Artificial Sequence: Synthetic oligonucleotide"
aacaaauucugcaauccucacu

SEQ ID NO: 828 - RNA, 21 nt, Artificial Sequence
  source: /note="Description of Artificial Sequence: Synthetic oligonucleotide"
acaaauucugcaauccucacu

SEQ ID NO: 829 - RNA, 24 nt, Artificial Sequence
  source: /note="Description of Artificial Sequence: Synthetic oligonucleotide"
caaaggacuucagugugacaccug

SEQ ID NO: 830 - RNA, 23 nt, Artificial Sequence
  source: /note="Description of Artificial Sequence: Synthetic oligonucleotide"
aaaggacuucagugugacaccug

SEQ ID NO: 831 - RNA, 22 nt, Artificial Sequence
  source: /note="Description of Artificial Sequence: Synthetic oligonucleotide"
aaggacuucagugugacaccug

SEQ ID NO: 832 - RNA, 21 nt, Artificial Sequence
  source: /note="Description of Artificial Sequence: Synthetic oligonucleotide"
aggacuucagugugacaccug

SEQ ID NO: 833 - RNA, 24 nt, Artificial Sequence
  source: /note="Description of Artificial Sequence: Synthetic oligonucleotide"
caccuuuuaaauauauuuuaucuu

SEQ ID NO: 834 - RNA, 23 nt, Artificial Sequence
  source: /note="Description of Artificial Sequence: Synthetic oligonucleotide"
accuuuuaaauauauuuuaucuu

SEQ ID NO: 835 - RNA, 22 nt, Artificial Sequence
  source: /note="Description of Artificial Sequence: Synthetic oligonucleotide"
ccuuuuaaauauauuuuaucuu

SEQ ID NO: 836 - RNA, 21 nt, Artificial Sequence
  source: /note="Description of Artificial Sequence: Synthetic oligonucleotide"
cuuuuaaauauauuuuaucuu

SEQ ID NO: 837 - RNA, 24 nt, Artificial Sequence
  source: /note="Description of Artificial Sequence: Synthetic oligonucleotide"
gugcaucugcaagcccaauguuga

SEQ ID NO: 838 - RNA, 23 nt, Artificial Sequence
  source: /note="Description of Artificial Sequence: Synthetic oligonucleotide"
ugcaucugcaagcccaauguuga

SEQ ID NO: 839 - RNA, 22 nt, Artificial Sequence
  source: /note="Description of Artificial Sequence: Synthetic oligonucleotide"
gcaucugcaagcccaauguuga

SEQ ID NO: 840 - RNA, 21 nt, Artificial Sequence
  source: /note="Description of Artificial Sequence: Synthetic oligonucleotide"
caucugcaagcccaauguuga

SEQ ID NO: 841 - RNA, 24 nt, Artificial Sequence
  source: /note="Description of Artificial Sequence: Synthetic oligonucleotide"
gucuuagcauuacagacaguccca

SEQ ID NO: 842 - RNA, 23 nt, Artificial Sequence
  source: /note="Description of Artificial Sequence: Synthetic oligonucleotide"
ucuuagcauuacagacaguccca

SEQ ID NO: 843 - RNA, 22 nt, Artificial Sequence
  source: /note="Description of Artificial Sequence: Synthetic oligonucleotide"
cuuagcauuacagacaguccca

SEQ ID NO: 844 - RNA, 21 nt, Artificial Sequence
  source: /note="Description of Artificial Sequence: Synthetic oligonucleotide"
uuagcauuacagacaguccca

SEQ ID NO: 845 - RNA, 24 nt, Artificial Sequence
  source: /note="Description of Artificial Sequence: Synthetic oligonucleotide"
agugcaucugcaagcccaauguug

SEQ ID NO: 846 - RNA, 23 nt, Artificial Sequence
  source: /note="Description of Artificial Sequence: Synthetic oligonucleotide"
gugcaucugcaagcccaauguug

SEQ ID NO: 847 - RNA, 22 nt, Artificial Sequence
  source: /note="Description of Artificial Sequence: Synthetic oligonucleotide"
ugcaucugcaagcccaauguug

SEQ ID NO: 848 - RNA, 21 nt, Artificial Sequence
  source: /note="Description of Artificial Sequence: Synthetic oligonucleotide"
gcaucugcaagcccaauguug

SEQ ID NO: 849 - RNA, 24 nt, Artificial Sequence
  source: /note="Description of Artificial Sequence: Synthetic oligonucleotide"
cacucugggcaguguagugcaaaa

SEQ ID NO: 850 - RNA, 23 nt, Artificial Sequence
  source: /note="Description of Artificial Sequence: Synthetic oligonucleotide"
acucugggcaguguagugcaaaa

SEQ ID NO: 851 - RNA, 22 nt, Artificial Sequence
  source: /note="Description of Artificial Sequence: Synthetic oligonucleotide"
cucugggcaguguagugcaaaa

SEQ ID NO: 852 - RNA, 21 nt, Artificial Sequence
  source: /note="Description of Artificial Sequence: Synthetic oligonucleotide"
ucugggcaguguagugcaaaa

SEQ ID NO: 853 - RNA, 24 nt, Artificial Sequence
  source: /note="Description of Artificial Sequence: Synthetic oligonucleotide"
ugucuuagcauuacagacaguccc

SEQ ID NO: 854 - RNA, 23 nt, Artificial Sequence
  source: /note="Description of Artificial Sequence: Synthetic oligonucleotide"
gucuuagcauuacagacaguccc

SEQ ID NO: 855 - RNA, 22 nt, Artificial Sequence
  source: /note="Description of Artificial Sequence: Synthetic oligonucleotide"
ucuuagcauuacagacaguccc

SEQ ID NO: 856 - RNA, 21 nt, Artificial Sequence
  source: /note="Description of Artificial Sequence: Synthetic oligonucleotide"
cuuagcauuacagacaguccc

SEQ ID NO: 857 - RNA, 24 nt, Artificial Sequence
  source: /note="Description of Artificial Sequence: Synthetic oligonucleotide"
cuuuuuugcacuacacugcccaga

SEQ ID NO: 858 - RNA, 23 nt, Artificial Sequence
  source: /note="Description of Artificial Sequence: Synthetic oligonucleotide"
uuuuuugcacuacacugcccaga

SEQ ID NO: 859 - RNA, 22 nt, Artificial Sequence
  source: /note="Description of Artificial Sequence: Synthetic oligonucleotide"
uuuuugcacuacacugcccaga

SEQ ID NO: 860 - RNA, 21 nt, Artificial Sequence
  source: /note="Description of Artificial Sequence: Synthetic oligonucleotide"
uuuugcacuacacugcccaga

SEQ ID NO: 861 - RNA, 24 nt, Artificial Sequence
  source: /note="Description of Artificial Sequence: Synthetic oligonucleotide"
caguguagugcaaaaaagaagcca

SEQ ID NO: 862 - RNA, 23 nt, Artificial Sequence
  source: /note="Description of Artificial Sequence: Synthetic oligonucleotide"
aguguagugcaaaaaagaagcca

SEQ ID NO: 863 - RNA, 22 nt, Artificial Sequence
  source: /note="Description of Artificial Sequence: Synthetic oligonucleotide"
guguagugcaaaaaagaagcca

SEQ ID NO: 864 - RNA, 21 nt, Artificial Sequence
  source: /note="Description of Artificial Sequence: Synthetic oligonucleotide"
uguagugcaaaaaagaagcca

SEQ ID NO: 865 - RNA, 24 nt, Artificial Sequence
  source: /note="Description of Artificial Sequence: Synthetic oligonucleotide"
aaaauauauuuaaaaggugaggau

SEQ ID NO: 866 - RNA, 23 nt, Artificial Sequence
  source: /note="Description of Artificial Sequence: Synthetic oligonucleotide"
aaauauauuuaaaaggugaggau

SEQ ID NO: 867 - RNA, 22 nt, Artificial Sequence
  source: /note="Description of Artificial Sequence: Synthetic oligonucleotide"
aauauauuuaaaaggugaggau

SEQ ID NO: 868 - RNA, 21 nt, Artificial Sequence
  source: /note="Description of Artificial Sequence: Synthetic oligonucleotide"
auauauuuaaaaggugaggau

SEQ ID NO: 869 - RNA, 24 nt, Artificial Sequence
  source: /note="Description of Artificial Sequence: Synthetic oligonucleotide"
acugugacacagcuggaucccucc

SEQ ID NO: 870 - RNA, 23 nt, Artificial Sequence
  source: /note="Description of Artificial Sequence: Synthetic oligonucleotide"
cugugacacagcuggaucccucc

SEQ ID NO: 871 - RNA, 22 nt, Artificial Sequence
  source: /note="Description of Artificial Sequence: Synthetic oligonucleotide"
ugugacacagcuggaucccucc

SEQ ID NO: 872 - RNA, 21 nt, Artificial Sequence
  source: /note="Description of Artificial Sequence: Synthetic oligonucleotide"
gugacacagcuggaucccucc

SEQ ID NO: 873 - RNA, 24 nt, Artificial Sequence
  source: /note="Description of Artificial Sequence: Synthetic oligonucleotide"
ugccaguguaaccuccauggcuca

SEQ ID NO: 874 - RNA, 23 nt, Artificial Sequence
  source: /note="Description of Artificial Sequence: Synthetic oligonucleotide"
gccaguguaaccuccauggcuca

SEQ ID NO: 875 - RNA, 22 nt, Artificial Sequence
  source: /note="Description of Artificial Sequence: Synthetic oligonucleotide"
ccaguguaaccuccauggcuca

SEQ ID NO: 876 - RNA, 21 nt, Artificial Sequence
  source: /note="Description of Artificial Sequence: Synthetic oligonucleotide"
caguguaaccuccauggcuca

SEQ ID NO: 877 - RNA, 24 nt, Artificial Sequence
  source: /note="Description of Artificial Sequence: Synthetic oligonucleotide"
uugcaauuuuggauuuaaauuucu

SEQ ID NO: 878 - RNA, 23 nt, Artificial Sequence
  source: /note="Description of Artificial Sequence: Synthetic oligonucleotide"
ugcaauuuuggauuuaaauuucu

SEQ ID NO: 879 - RNA, 22 nt, Artificial Sequence
  source: /note="Description of Artificial Sequence: Synthetic oligonucleotide"
gcaauuuuggauuuaaauuucu

SEQ ID NO: 880 - RNA, 21 nt, Artificial Sequence
  source: /note="Description of Artificial Sequence: Synthetic oligonucleotide"
caauuuuggauuuaaauuucu

SEQ ID NO: 881 - RNA, 24 nt, Artificial Sequence
  source: /note="Description of Artificial Sequence: Synthetic oligonucleotide"
gagacagugcaauaaauguuugga

SEQ ID NO: 882 - RNA, 23 nt, Artificial Sequence
  source: /note="Description of Artificial Sequence: Synthetic oligonucleotide"
agacagugcaauaaauguuugga

SEQ ID NO: 883 - RNA, 22 nt, Artificial Sequence
  source: /note="Description of Artificial Sequence: Synthetic oligonucleotide"
gacagugcaauaaauguuugga

SEQ ID NO: 884 - RNA, 21 nt, Artificial Sequence
  source: /note="Description of Artificial Sequence: Synthetic oligonucleotide"
acagugcaauaaauguuugga

SEQ ID NO: 885 - RNA, 24 nt, Artificial Sequence
  source: /note="Description of Artificial Sequence: Synthetic oligonucleotide"
ggaaaaugauuucauucaagauag

SEQ ID NO: 886 - RNA, 23 nt, Artificial Sequence
  source: /note="Description of Artificial Sequence: Synthetic oligonucleotide"
gaaaaugauuucauucaagauag

SEQ ID NO: 887 - RNA, 22 nt, Artificial Sequence
  source: /note="Description of Artificial Sequence: Synthetic oligonucleotide"
aaaaugauuucauucaagauag

SEQ ID NO: 888 - RNA, 21 nt, Artificial Sequence
  source: /note="Description of Artificial Sequence: Synthetic oligonucleotide"
aaaugauuucauucaagauag

SEQ ID NO: 889 - RNA, 24 nt, Artificial Sequence
  source: /note="Description of Artificial Sequence: Synthetic oligonucleotide"
auaaaauauauuuaaaaggugagg

SEQ ID NO: 890 - RNA, 23 nt, Artificial Sequence
  source: /note="Description of Artificial Sequence: Synthetic oligonucleotide"
uaaaauauauuuaaaaggugagg

SEQ ID NO: 891 - RNA, 22 nt, Artificial Sequence
  source: /note="Description of Artificial Sequence: Synthetic oligonucleotide"
aaaauauauuuaaaaggugagg

SEQ ID NO: 892 - RNA, 21 nt, Artificial Sequence
  source: /note="Description of Artificial Sequence: Synthetic oligonucleotide"
aaauauauuuaaaaggugagg

SEQ ID NO: 893 - RNA, 24 nt, Artificial Sequence
  source: /note="Description of Artificial Sequence: Synthetic oligonucleotide"
aagggagacagugcaauaaauguu

SEQ ID NO: 894 - RNA, 23 nt, Artificial Sequence
  source: /note="Description of Artificial Sequence: Synthetic oligonucleotide"
agggagacagugcaauaaauguu

SEQ ID NO: 895 - RNA, 22 nt, Artificial Sequence
  source: /note="Description of Artificial Sequence: Synthetic oligonucleotide"
gggagacagugcaauaaauguu

SEQ ID NO: 896 - RNA, 21 nt, Artificial Sequence
  source: /note="Description of Artificial Sequence: Synthetic oligonucleotide"
ggagacagugcaauaaauguu

SEQ ID NO: 897 - RNA, 24 nt, Artificial Sequence
  source: /note="Description of Artificial Sequence: Synthetic oligonucleotide"
ucacauccaacaucauuaaagcuu

SEQ ID NO: 898 - RNA, 23 nt, Artificial Sequence
  source: /note="Description of Artificial Sequence: Synthetic oligonucleotide"
cacauccaacaucauuaaagcuu

SEQ ID NO: 899 - RNA, 22 nt, Artificial Sequence
  source: /note="Description of Artificial Sequence: Synthetic oligonucleotide"
acauccaacaucauuaaagcuu

SEQ ID NO: 900 - RNA, 21 nt, Artificial Sequence
  source: /note="Description of Artificial Sequence: Synthetic oligonucleotide"
cauccaacaucauuaaagcuu

SEQ ID NO: 901 - RNA, 24 nt, Artificial Sequence
  source: /note="Description of Artificial Sequence: Synthetic oligonucleotide"
ggagacagugcaauaaauguuugg

SEQ ID NO: 902 - RNA, 23 nt, Artificial Sequence
  source: /note="Description of Artificial Sequence: Synthetic oligonucleotide"
gagacagugcaauaaauguuugg

SEQ ID NO: 903 - RNA, 22 nt, Artificial Sequence
  source: /note="Description of Artificial Sequence: Synthetic oligonucleotide"
agacagugcaauaaauguuugg

SEQ ID NO: 904 - RNA, 21 nt, Artificial Sequence
  source: /note="Description of Artificial Sequence: Synthetic oligonucleotide"
gacagugcaauaaauguuugg

SEQ ID NO: 905 - RNA, 24 nt, Artificial Sequence
  source: /note="Description of Artificial Sequence: Synthetic oligonucleotide"
uuauugcacugucucccuucaaca

SEQ ID NO: 906 - RNA, 23 nt, Artificial Sequence
  source: /note="Description of Artificial Sequence: Synthetic oligonucleotide"
uauugcacugucucccuucaaca

SEQ ID NO: 907 - RNA, 22 nt, Artificial Sequence
  source: /note="Description of Artificial Sequence: Synthetic oligonucleotide"
auugcacugucucccuucaaca

SEQ ID NO: 908 - RNA, 21 nt, Artificial Sequence
  source: /note="Description of Artificial Sequence: Synthetic oligonucleotide"
uugcacugucucccuucaaca

SEQ ID NO: 909 - RNA, 24 nt, Artificial Sequence
  source: /note="Description of Artificial Sequence: Synthetic oligonucleotide"
acauccaacaucauuaaagcuucg

SEQ ID NO: 910 - RNA, 23 nt, Artificial Sequence
  source: /note="Description of Artificial Sequence: Synthetic oligonucleotide"
cauccaacaucauuaaagcuucg

SEQ ID NO: 911 - RNA, 22 nt, Artificial Sequence
  source: /note="Description of Artificial Sequence: Synthetic oligonucleotide"
auccaacaucauuaaagcuucg

SEQ ID NO: 912 - RNA, 21 nt, Artificial Sequence
  source: /note="Description of Artificial Sequence: Synthetic oligonucleotide"
uccaacaucauuaaagcuucg

SEQ ID NO: 913 - RNA, 24 nt, Artificial Sequence
  source: /note="Description of Artificial Sequence: Synthetic oligonucleotide"
uccgaagcuuuaaugauguuggau

SEQ ID NO: 914 - RNA, 23 nt, Artificial Sequence
  source: /note="Description of Artificial Sequence: Synthetic oligonucleotide"
ccgaagcuuuaaugauguuggau

SEQ ID NO: 915 - RNA, 22 nt, Artificial Sequence
  source: /note="Description of Artificial Sequence: Synthetic oligonucleotide"
cgaagcuuuaaugauguuggau

SEQ ID NO: 916 - RNA, 21 nt, Artificial Sequence
  source: /note="Description of Artificial Sequence: Synthetic oligonucleotide"
gaagcuuuaaugauguuggau

SEQ ID NO: 917 - RNA, 24 nt, Artificial Sequence
  source: /note="Description of Artificial Sequence: Synthetic oligonucleotide"
ggcagugcaucugcaagcccaaug

SEQ ID NO: 918 - RNA, 23 nt, Artificial Sequence
  source: /note="Description of Artificial Sequence: Synthetic oligonucleotide"
gcagugcaucugcaagcccaaug

SEQ ID NO: 919 - RNA, 22 nt, Artificial Sequence
  source: /note="Description of Artificial Sequence: Synthetic oligonucleotide"
cagugcaucugcaagcccaaug

SEQ ID NO: 920 - RNA, 21 nt, Artificial Sequence
  source: /note="Description of Artificial Sequence: Synthetic oligonucleotide"
agugcaucugcaagcccaaug

SEQ ID NO: 921 - RNA, 24 nt, Artificial Sequence
  source: /note="Description of Artificial Sequence: Synthetic oligonucleotide"
gggagacagugcaauaaauguuug

SEQ ID NO: 922 - RNA, 23 nt, Artificial Sequence
  source: /note="Description of Artificial Sequence: Synthetic oligonucleotide"
ggagacagugcaauaaauguuug

SEQ ID NO: 923 - RNA, 22 nt, Artificial Sequence
  source: /note="Description of Artificial Sequence: Synthetic oligonucleotide"
gagacagugcaauaaauguuug

SEQ ID NO: 924 - RNA, 21 nt, Artificial Sequence
  source: /note="Description of Artificial Sequence: Synthetic oligonucleotide"
agacagugcaauaaauguuug

SEQ ID NO: 925 - RNA, 17 nt, Artificial Sequence
  source: /note="Description of Artificial Sequence: Synthetic oligonucleotide"
gugucacacugaagucc

SEQ ID NO: 926 - RNA, 17 nt, Artificial Sequence
  source: /note="Description of Artificial Sequence: Synthetic oligonucleotide"
ggugugaucauugcaau

SEQ ID NO: 927 - RNA, 20 nt, Artificial Sequence
  source: /note="Description of Artificial Sequence: Synthetic oligonucleotide"
gggcucacauccaacaucau

SEQ ID NO: 928 - RNA, 17 nt, Artificial Sequence
  source: /note="Description of Artificial Sequence: Synthetic oligonucleotide"
cacuacacugcccagag

SEQ ID NO: 929 - RNA, 17 nt, Artificial Sequence
  source: /note="Description of Artificial Sequence: Synthetic oligonucleotide"
aaaaggugaggauggga

SEQ ID NO: 930 - RNA, 17 nt, Artificial Sequence
  source: /note="Description of Artificial Sequence: Synthetic oligonucleotide"
cucacauccaacaucau

SEQ ID NO: 931 - RNA, 17 nt, Artificial Sequence
  source: /note="Description of Artificial Sequence: Synthetic oligonucleotide"
acugucucccuucaaca

SEQ ID NO: 932 - RNA, 20 nt, Artificial Sequence
  source: /note="Description of Artificial Sequence: Synthetic oligonucleotide"
caggugucacacugaagucc

SEQ ID NO: 933 - RNA, 20 nt, Artificial Sequence
  source: /note="Description of Artificial Sequence: Synthetic oligonucleotide"
uuaggugugaucauugcaau

SEQ ID NO: 934 - RNA, 20 nt, Artificial Sequence
  source: /note="Description of Artificial Sequence: Synthetic oligonucleotide"
uugcacuacacugcccagag

SEQ ID NO: 935 - RNA, 20 nt, Artificial Sequence
  source: /note="Description of Artificial Sequence: Synthetic oligonucleotide"
ugcacugucucccuucaaca

SEQ ID NO: 936 - RNA, 20 nt, Artificial Sequence
  source: /note="Description of Artificial Sequence: Synthetic oligonucleotide"
uuuaaaaggugaggauggga

SEQ ID NO: 937 - RNA, 17 nt, Artificial Sequence
  source: /note="Description of Artificial Sequence: Synthetic oligonucleotide"
uaaauauauuuuaucuu

SEQ ID NO: 938 - RNA, 17 nt, Artificial Sequence
  source: /note="Description of Artificial Sequence: Synthetic oligonucleotide"
uuggauuuaaauuucuc

SEQ ID NO: 939 - RNA, 20 nt, Artificial Sequence
  source: /note="Description of Artificial Sequence: Synthetic oligonucleotide"
uuuuaaauauauuuuaucuu

SEQ ID NO: 940 - RNA, 20 nt, Artificial Sequence
  source: /note="Description of Artificial Sequence: Synthetic oligonucleotide"
auuuuggauuuaaauuucuc

SEQ ID NO: 941 - DNA, 43 bp, Artificial Sequence
  source: /note="Description of Artificial Sequence: Synthetic oligonucleotide"
acttttatgggttagatgtcaccaattgtaaagcctgtgactg
